(19) United States
(12) Patent Application Publication
(10) Pub. No.: US 2021/0174902 A1
(43) Pub. Date: Jun. 10, 2021

(54) RECOMBINASE DISCOVERY

(71) Applicant: Homodeus, Inc., Guilford, CT (US)

(72) Inventors: Harry Kemble, Paris (FR); Spencer Glantz, West Hartford, CT (US); Jonathan M. Rothberg, Guilford, CT (US)

(73) Assignee: Homodeus, Inc., Guilford, CT (US)

(21) Appl. No.: 17/117,921

(22) Filed: Dec. 10, 2020

Related U.S. Application Data
(60) Provisional application No. 62/946,196, filed on Dec. 10, 2019.

(51) Int. Cl. G16B 30/10; G16B 40/00

(52) U.S. Cl. CPC G16B 30/10; G16B 40/00

(57) ABSTRACT

The present disclosure provides methods, compositions, kits, and systems for identifying recombinases and cognate site-specific recombinase recognition sites as well as method for using the identified recombinase/recognition site pairs.

### RELATED APPLICATION

[0001] This application claims the benefit under 35 U.S.C. § 119(e) of U.S. provisional application No. 62/946,196, filed Dec. 10, 2019, which is incorporated by reference herein in its entirety.

### BACKGROUND

[0002] Site-specific recombinases are enzymes that catalyze precise DNA rearrangements, or recombination events, at specific DNA target site pairs (e.g., 30-150 nucleotides long each site). Each individual natural recombinase has evolved to act with some degree of specificity at its own unique recognition sites and not at other “off-target” DNA sites. DNA recombination events involve DNA breakage, strand exchange between homologous segments, and rejoining of the DNA. Site-specific recombinases can vastly differ in their overall amino acid composition, however, recombinases have individual sub-regions (domains), that are highly conserved across recombinase family members. To find new putative recombinases, one can simply search candidate genomic sequences for the presence of those conserved domains.

### SUMMARY

[0003] Provided herein, in some aspects, are methods that may be used to (i) identify genes that encode site-specific recombinases and (ii) predict the cognate recognition site pairs within target genomes that the recombinases recognize and recombine.

[0004] Some aspects of the present disclosure provide methods (e.g., computer implemented methods) comprising mining from a protein database (e.g., Conserved Domain Database (CDD)) putative recombinase sequences based on conserved recombinase domain architecture, linking the putative recombinase sequences to prokaryotic genomic sequences containing their corresponding coding sequences, scanning those genomic sequences to identify prophage sequences (using e.g., PHAST or PHASTER) containing the coding sequences, aligning those prophage sequences and their boundary-flanking sequences with homologous genomic sequences from the same genus to produce sequence alignments (e.g., using MegaBLAST), and automatically solving for putative cognate recombinase recognition sites by detecting overlapping sequences in the sequence alignments.

[0005] Other aspects of the present disclosure provide a computer readable medium on which is stored a computer program which, when implemented by a computer processor, causes the processor to mine from a protein database putative recombinase sequences based on conserved recombinase domain architecture or other measure of homology to known recombinases, link the putative recombinase sequences to prokaryotic genomic sequences containing their corresponding coding sequences, scan those genomic sequences to identify prophage sequences containing the coding sequences, align the prophage sequences and their boundary-flanking sequences with homologous genomic sequences from the same genus to produce sequence alignments, and automatically solve for putative cognate recombinase recognition sites by detecting overlapping sequences in the sequence alignments.

[0006] In some embodiments, the mining is based on a precisely ordered recombinase domain superfamily architecture.

[0007] In some embodiments, the linking includes accessing a database (e.g., Entrez Nucleotide database) that comprises annotated records.

[0008] In some embodiments, the linking includes automatically removing uninformative nucleotide sequences from the genomic coding sequences.

[0009] In some embodiments, the genomic coding sequences includes at least 2, at least 5, at least 10, at least 25, at least 50, or at least 100 annotated genomic coding sequences.

[0010] In some embodiments, the boundary-flanking sequences have a length of at least 20 kilobases (kb). For example, the boundary-flanking sequences may have a length of 20, 25, 30, 35, 40, 45, or 50 kb.

[0011] In some embodiments, the automatically solving includes defining multiple putative cognate recombinase recognition sites for a single recombinase.

[0012] In some embodiments, the automatically solving includes implementation of an algorithm that includes a measure of confidence in each predicted recombinase recognition site set, optionally in the form of ambiguity scores.

[0013] In some embodiments, the method is automated.

[0014] In some embodiments, the methods further comprise continuously updating the solved recombinase list as the protein database is updated.

[0015] In some embodiments, the methods further comprise verifying that all putative cognate recombinase recognition sites solved flank a sequence encoding at least one of the putative recombinase sequences.

[0016] In some embodiments, the putative recombinase sequences comprise tyrosine and/or serine recombinase sequences. In some embodiments, the serine recombinase sequences comprise resolvase and/or integrase sequences.

[0017] In some embodiments, the recombinases are thermostable. In some embodiments, the recombinases amino acid sequences contain one or more sub-sequences (e.g. nuclear localization signals) that collectively result in the transportation of the folded protein to a eukaryotic cell nucleus.

### BRIEF DESCRIPTION OF THE DRAWINGS

[0018] FIG. 1 is a flow diagram of the steps of an illustrative process for discovering recombinases and cognate recognition site pairs.

[0019] FIG. 2 is a block diagram of an illustrative implementation of a computer system for discovering recombinases and cognate recognition site pairs.

[0020] FIG. 3 is a schematic showing clustering of protein sequences by their homology to the cluster “centroid,” where all proteins in a given cluster share more than some threshold (e.g., 30%) degree of homology to the centroid, and are closer in homology space to their assigned cluster centroid than to any other cluster centroid.

[0021] FIG. 4 is a schematic showing recombinases cluster together in families according to their shared sequence homology. Clusters are defined in this figure as recombinases that give BLAST alignment e-values of <10E-10. Recombinases disclosed herein that have newly discovered recognition sites are light gray colored, and recombinases with previously published DNA target sites are medium gray colored.

[0022] FIG. 5 is a schematic comparing recombinase targets not yet present (left) and already present (right) at a desired recombination site.

### DETAILED DESCRIPTION

[0023] Making specific changes to nucleic acids in vitro, in cells, and in multicellular living organisms has been a major focus of the biotechnology community for decades. Precision DNA editing is important to the research community, which seeks to understand the role that the genome plays in cellular and organismal biology across the many kingdoms of life. Genome editing is also relevant to healthcare because it can serve as the basis for many therapeutic strategies. For example, gene editing tools may be used, among many other applications, to reprogram immune cells to seek out and eliminate cancer cells, make specific edits to patients' genomes to correct for disease-causing mutations, and/or engineer bacteriophage viruses such that they seek out and eliminate bacterial infections. Further, genome editing is important for the biotechnology industry as a whole. The agricultural industry has made genetically-engineered crops designed to better withstand harsh environmental conditions, such as drought or the presence of pathogens, and the genomes of domesticated animals have been modified to facilitate safe food production.

[0024] New site-specific recombinases that recombine DNA at previously unknown target (recognition) sites are useful as each one can unlock the power to make precise DNA edits at new genomic locations and enable at least the aforementioned applications. Unlike any of the other genome engineering enzymes commercially available today, including transposases and nucleases, site-specific recombinases can perform precision integration, excision, inversion, translocation, and cassette exchange with minimal off-targeting. In aggregate, having a large collection of recombinases and cognate recognition site pairs is also useful for enhancing our understanding of recombinase structure/function, which will, in turn, enable the design of new, engineered recombinases that edit DNA with high efficiency at target sites never before recombined in nature.

[0025] Aspects of the present disclosure uniquely combine two advantageous approaches for predicting the DNA recognition sites for a putative site-specific recombinase: in vitro assays used to quantify the physical interaction between a recombinase and a library of potential candidate DNA recognition sites and in silico methods used to identify genomic evidence of recombination by a particular recombinase at a particular DNA site. Unlike current methods, the methods of the present disclosure, in some embodiments, (i) include algorithmic advancements that improve the identification of new recombinases and cognate recognition site pairs, and/or (ii) are fully automated, thus providing consistent, predictable, fast and high-throughput performance, and/or (iii) include quality control steps for improved accuracy, and/or (iv) continuously access and scan public databases to identify new recombinases and cognate recognition site pairs as new sequencing data is deposited.

[0026] The in vitro methods depend on the availability of purified recombinase protein, and thus, have been low-throughput to date with respect to the numbers of unique recombinase: recognition site pairs that can be solved. Furthermore, in vitro assays designed to identify potential recognition sites among unbiased (all possible) DNA target (recognition) sites only consider recombinase:DNA binding and cannot make predictions regarding which sites will permit actual recombination. An in vitro method that does consider DNA recombination at a library of candidate sites requires the use of a biased DNA recognition site library that is based upon an excellent starting prediction as to the actual recognition site, and thus could not be used in cases where the recognition site must be predicted ab initio.

[0027] In silico methods are available for the prediction of recognition site pairs for the Cre-like subtype of the tyrosine recombinase family and the phage large serine integrase subtype of the serine recombinase family. Recognition site pair prediction for the latter is enabled by the known biology of phage large serine integrases: during the natural course of bacterial infection by a temperate bacteriophage, recombinase genes in the phage genome may be expressed. Phage-produced recombinase enzyme can then facilitate the insertion of the phage genome into the host bacterial genome at a specific bacterial DNA site. Therefore, sequencing data that reveals the presence of a prophage integrated into a bacterial genome contains evidence as to the DNA targets at which that recombination event occurred.

[0028] Large serine integrases, a particular type of serine recombinases, perform recombination between four (4) DNA target sites (attL, attR, attB and attP) with no known motif or bias, and so their discovery is all the more difficult. If a recombinase gene can be identified within an integrated prophage, and the sequence of the prophage in the context of its integration into the host bacterial genome is known, and the sequence of a similar host genome in the absence of prophage integration is known, the original DNA target sites (also known as “substrates”) can be predicted and matched with the site-specific recombinase that performed the integration at that precise genomic location.

[0029] Aspects of the present disclosure comprise (1) mining from a protein database putative recombinase sequences based on conserved recombinase domain architecture, (2) linking the putative recombinase sequences to prokaryotic genomic sequences containing their corresponding coding sequences, (3) scanning those genomic sequences to identify prophage sequences containing the coding sequences, (4) aligning the prophage sequences and their boundary-flanking sequences with homologous genomic sequences from the same genus to produce sequence alignments, and/or (5) solving (e.g., automatically solving) for putative cognate recombinase recognition sites by detecting overlapping sequences in the sequence alignments. A flow chart of an exemplary method of the present disclosure is provided in FIG. 1. At least some of these steps may be implemented in software which can be carried out by a computing device. Thus, provided herein, in some embodiments, is a dynamic pipeline that, as sequencing databases grow in volume, continuously identifies recombinase genes and solves their cognate recognition sites (their associated DNA target sites) and improves the prediction quality for ambiguous target sites. In contrast to executing the method once at single point in time, a continuously operating pipeline results in increased recombinase and recombinase target site identification by constantly taking advantage of newly deposited sequences in sequencing databases.

[0030] Mining Protein Database(s)

[0031] In some embodiments, the methods comprise mining (e.g., automatically mining) from a protein database putative recombinase sequences based on conserved recombinase domain architecture. A set of precisely ordered conserved domain superfamily architectures characteristic of several known recombinase members may be defined, for example, by performing a conserved domain database search of the amino acid sequences of the known recombinase members. It should be understood that while described with respect to particular databases, the conserved domain database search is not limited to said particular databases. In some embodiments, the conserved domain database search is performed using any now known or later developed databases, each of which are contemplated to be within the scope of the present disclosure. Use, in some embodiments, of such a precisely ordered conserved domain architecture search to identify new recombinase genes (as opposed to a non-ordered conserved domain search) increases the probability that the identified putative recombinase sequences represent valid, functional recombinases. This in turn increases algorithmic speed by avoiding recognition site searches for low-quality, non-valid recombinases.

[0032] A protein (e.g., recombinase) domain is a conserved subsequence of a protein that can fold, function, and exist at least somewhat independently of the rest of the protein chain or structure. A domain architecture is the sequential order of conserved domains (functional units) in a protein sequence. Protein domains classified by CATH (class, architecture, topology, homology), for example, include Class 1 alpha-helices and Class 2 beta-sheets, e.g., α Horseshoes, α solenoides, aa barrels, 5-bladed β propellers, 3-layer (βββ) sandwiches, α/β super-rolls, 3-layer (βαβ) sandwiches, and α/β prisms (see, e.g., Nucleic Acids Res. 2009 January; 37 (Database issue): D310-D314). In some embodiments, a conserved recombinase domain is selected from members of the National Center for Biotechnology Information (NCBI) Conserved Domain (CD) Ser_Recombinase Superfamily (c102788) (comprising e.g., the NCBI CD Ser_Recombinase domain (cd00338), the SMART Resolvase domain (smart00857) and the Pfam Resolvase domain (pfam00239)), members of the NCBI CD PinE Superfamily (c134383) (comprising, e.g., the COG Site-specific recombinases, DNA invertase Pin homologs domain COG1961), members of the NCBI CD Recombinase Superfamily (c106512) (comprising e.g., the Pfam Recombinase domain (pfam07508)), members of the NCBI CD Zn_ribbon_recom Superfamily (c119592) (comprising e.g., the Pfam Zn_ribbon_recom domain (pfam13408), the Pfam Ogr_Delta domain (pfam04606) and the NCBI Protein Clusters domain PRK09678), members of the NCBI CD DNA_BRE_C Superfamily (c100213) (comprising e.g., the NCBI Protein Clusters domains PHA02731, PRK09870 and PRK09871, the Pfam Integrase_1 domain (pfam12835), the Pfam Phage_integrase domain (pfam00589), the Pfam Phage_integr_3 domain (pfam16795), and the Pfam Topoisom_I domain (pfam01028)), members of the NCBI CD XerC Superfamily (c128330) (comprising, e.g., the COG XerC domains COG0582 and COG4973, the COG XerD domain COG4974, the NCBI Protein Clusters domains PRK15417, PHA02601, PRK00236, PRK00283, PRK01287, PRK02436 and PRK05084, the TIGRFAMs recomb_XerC domain (TIGR02224) and the TIGRFAMs recomb_XerD domain (TIGR02225)), members of the NCBI CD Phage_int_SAM_1 Superfamily (c112235) (comprising, e.g., the Pfam Phage_int_SAM_1 domain (pfam02899) and the Pfam Phage_int_SAM_4 domain (pfam13495)), and members of the NCBI CD Arm-DNA-bind_l Superfamily (c107565) (comprising, e.g., the Pfam Arm-DNA-bind_l domain (pfam09003)) (see, e.g., Smith M C, Thorpe H M. Mol Microbiol. 2002; 44:299-307; Li W, et al. Science. 2005; 309:1210-1215; and Rutheford K, et al. Nucleic Acids Res. 2013; 41:8341-8356). In some embodiments, a conserved recombinase domain superfamily architecture is defined as an N-terminal NCBI CD Ser_Recombinase Superfamily (c102788), followed by NCBI CD Recombinase Superfamily (c106512), followed by any conserved domain(s) or no conserved domain, or by a sequence containing a coiled-coil motif.

[0033] The protein database used to mine putative recombinase sequences, in some embodiments, is the Conserved Domain Database (CDD) (ncbi nlm nih gov/Structure/cdd/cdd_help.shtml). The CDD can be used in some embodiments to identify protein similarities across significant evolutionary distances using sensitive domain profiles rather than direct sequence similarity. In some embodiments, given one or more protein query sequences, such as recombinase sequences, CD-Search (ncbi nlm nih gov/Structure/cdd/cdd_help.shtml#CDSearch_help_contents), Batch CD-search (ncbi nlm nih gov/Structure/cdd/cdd_help.shtml#BatchCDSearch_help_contents) or CDART (ncbi nlm nih gov/Structure/lexington/docs/cdart_about.html) can be used to reveal the conserved domains that make up a protein, as identified by RPS-BLAST. In some embodiments, CDART can be further be used to list proteins with a similar conserved domain architecture. In some embodiments, a query is submitted as a (a) protein sequence (in the form of a sequence identifier or as sequence data), (b) set of conserved domains (in the form of superfamily cluster IDs, conserved domain accession numbers, or PSSM IDs), or as (c) multiple queries.

[0034] In other embodiments, a protein sequence record is retrieved from another protein database, such as the Entrez Protein database, which is a collection of sequences from several sources, including translations from annotated coding regions in GenBank, RefSeq and Third Party Annotation (TPA), as well as records from SwissProt, the Protein Information Resource (PIR), Programmed Ribosomal Frameshift Database (PRFdb), and the Protein Data Bank (PDB) (www.ncbi.nlm nih.gov/protein).

[0035] Linking Recombinases to Coding Sequences

[0036] In some embodiments, the methods comprise linking (e.g., automatically linking) the putative recombinase sequences to corresponding genomic coding sequences. For each putative recombinase protein, more than one gene, and in some embodiments, all genes encoding the putative recombinase are identified (e.g., from sequenced genomes in the NCBI Entrez Nucleotide database). In some embodiments, at least 5, at least 10, at least 25, at least 50, at least 100, or at least 1000 genes encoding the putative recombinase are identified. Retrieving many or even all annotated coding sequences for each putative site-specific recombinase gene (as opposed to just a single coding sequence) increases the probability of detecting one or more instances where sufficient genetic information is available for the recombinase's recognition site to be solved. Multiple examples also open up the possibility of solving several sets of DNA target sites for a single putative integrase encoded from different genetic contexts, providing biological replicates. This additional information improves the quality of the recognition site prediction by suggesting the specificity of a recombinase for its recognition sites.

[0037] The linking step(s), in some embodiments, includes accessing a database that comprises annotated records of genomes assembled from long-read nucleotide sequences (e.g., technology from PacBio or Nanopore), short-read nucleotide sequences (e.g., Illumina next-generation sequencing reads), or a combination of long- and short-read nucleotide sequences, or directly annotated records of long-read nucleotide sequences. The database may be, for example, the Identical Protein Groups database, which is a resource that contains a single entry for each protein translation found in several sources at NCBI, including annotated coding regions in GenBank and RefSeq, as well as records from SwissProt and PDB.

[0038] In some embodiments, an automated filtering process is used to filter unusable putative recombinase coding sequences (e.g., engineered variants). For example, genomic sequences carrying already known integrase genes, or those derived from plasmids or non-integrated phages may be removed.

[0039] Scanning Prophage Database(s)

[0040] In some embodiments, the methods comprise scanning (e.g., automatically scanning) the prokaryotic genomic sequences containing the putative integrase coding sequences for signals of prophages, to identify and locate prophage sequences. In some embodiments, prophage sequences are identified using a prophage-detection program (web-based or locally executable) selected from PHASTER, PHAST, Prophage Hunter, Prophinder, and PhiSpy (see, e.g., Arndt D et al. Nucleic Acids Res. 2016 Jul. 8; 44(W1):W16-21; Zhou Y et al. Nucleic Acids Res. 2011 July; 39(Web Server issue):W347-52; Song W et al. Nucleic Acids Research, 2019; 47(W1): W74-W80; Lima-Mendez G et al. Bioinformatics. 2008 Mar. 15; 24(6):863-5; Akhter S et al. Nucleic Acids Res. 2012 September; 40(16): e126). In some embodiments, default program parameters are used. For locally-executable programs, FASTA files, for example, containing all the unique nucleotide sequences named in the filtered IPG record tables can be first downloaded to use as the input for the prophage-detection program, using, for example, the Entrez Utilities command, EFetch (with parameters: db=“nuccore”, id=[Nucleotide record accession.version], retype=“FASTA”).

[0041] For each putative prophage predicted to contain one or more of the putative recombinase coding sequences, the DNA sequence containing the putative prophage region and at least 10, at least 15, or at least 20 kilobases (kb) upstream and downstream of the putative prophage region is extracted and searched for alignments against all the non-redundant homologous genomes belonging to the same genus as the putative prophage host. In some embodiments, for each putative prophage predicted to contain one or more of the putative recombinase coding sequences, the DNA sequence containing the putative prophage region and approximately 20 kb upstream and downstream of the putative prophage region is extracted. In some embodiments, this alignment is done using the NCBI Megablast program, optionally with default parameters. The process of identifying genus-specific reference genomes may be automated, for example, enabling a more comprehensive search in less time. In some embodiments, an error-margin is allowed in the initial prediction of prophage coordinates, as opposed to a more stringent coordinate setting. This error-margin increases the probability that recombinase target sites can be solved by avoiding premature discounting of recombinase coding sequences that do not lie within the originally predicted prophage coordinates but may later be discovered to indeed lie within the precisely solved prophage coordinates. Further, by increasing the error-margin allowance in identification of prophage-flanking regions used for reference genome searching, for example, extracting at least 20 kb of sequence flanking the prophage region for alignment against reference sequences increases the chance of correctly finding the prophage boundaries and thus improves the hit rate of target site solving (compared to allowing smaller error-margins and extracting, e.g., ˜10 kb flanking sequences).

[0042] In the event that a genus-specific reference genome search fails, a broader reference genome set (all whole genome prokaryotic sequences in the sequencing database) may be searched (rather than simply marking the attempt a failure after the primary, narrower search). This secondary, broad reference genome search increases the probability that recombinase substrates can be identified even for recombinase genes embedded in prophages integrated into host genomes that do not have a readily available identifiable reference genome already annotated at the genus level.

[0043] Aligning Prophage Sequences

[0044] In some embodiments, the methods comprise aligning (e.g., automatically aligning) the prophage sequences and their boundary-flanking sequences with homologous genomic sequences from the same genus to produce sequence alignments. If a homologous genomic sequence lacking the integrated prophage is present in the alignment reference database, the precise prophage boundaries in the query sequence may be detected as a small (e.g., 2-18 base pairs (bp)) overlap between multiple alignment ranges in a reference genomic sequence, corresponding to the left and right prophage-flanking regions. In some embodiments, the overlap of the phage boundary alignment ranges is 2-50 base pairs (bp). For example, the overlap of the phage boundary alignment ranges may be 2-40, 2-30, 2-20, 5-40, 5-30, 5-20, 10-40, 10-30, or 10-20 bp. Putative recombinase recognition sites (e.g., attL, attR, attB and attP) may be inferred from the, e.g., 59-66 bp, sequences centered on the core sequence defined by this overlap. In some embodiments, putative recombinase recognition sites are inferred from 30-100 bp sequences centered on the core sequence. For example, putative recombinase recognition sites may be inferred from 30-90, 30-80, 30-70, 30-60, 40-90, 40-80, 40-70, 40-60, 50-90, 50-80, 50-70, or 50-60 bp sequences centered on the core sequence.

[0045] In some embodiments, a strategy is applied to extract useful information from (relatively common) cases where the sequences of a “left overlap” and “right overlap” are non-identical. This increases the probability of obtaining target site information for a given recombinase (see, e.g., FIG. 1, Steps 4-6).

[0046] Further, instead of basing att site inferences on just a single alignment, in some embodiments, multiple or all pairs of “left overlap” and “right overlap” detected from the alignment output can be considered to potentially define a list of att core sequences associated with a given prophage. This increases the chances of defining an unambiguous core sequence for a given prophage's att sites, as well as provides other information relating to the confidence in the inferred att sites of a given prophage.

[0047] Solving Recombinase Recognition Site(s)

[0048] In some embodiments, the methods comprise solving (e.g., automatically solving) for putative cognate recombinase recognition sites by detecting overlapping sequences in the sequence alignments. In some embodiments, this step involves fully automated application of a rapid and sensitive algorithm for solving recombinase target sites from the boundary regions of host genome-integrated prophages using alignments.

[0049] The algorithm may also assess the number of total integrase genes harbored within a given prophage, which provides a measure of confidence as to the likelihood of any particular integrase acting on the associated prophage boundary substrates, increasing the accuracy of the overall algorithm. The algorithm used for solving putative cognate recombinase recognition sites includes, in some embodiments, a measure of confidence in each predicted recombinase recognition site set, in the form of ambiguity scores, which increase the quality of the prediction by providing an assessment of its validity.

[0050] In some embodiments, a verification step is included to ensure that a putative recombinase is only ascribed to a particular target pair if it has a coding sequence located within the precisely solved prophage boundaries (not just the imprecise original initial estimate of the prophage boundaries computed earlier in the pipeline). This verification step increases the accuracy of recombinase and cognate target recognition site prediction by eliminating unlikely pairings.

[0051] Recombinases and Recombination Recognition Sequences

[0052] Recombinases are enzymes that mediate site-specific recombination (site-specific recombinases) by binding to nucleic acids via conserved DNA recognition sites (e.g., between 30 and 100 base pairs (bp)) and mediating at least one of the following forms of DNA rearrangement: integration, excision/resolution, inversion, translocation, and/or cassette exchange.

[0053] A site-specific recombinase may be used outside of its natural context in at least two ways: (1) one or more recombinase recognition sites are first engineered into one or more target nucleic acids and then a recombinase is used to perform the desired rearrangement, or (2) a recombinase is used to recombine one or more nucleic acids at their recognition site(s), which were already present in the target nucleic acid (see, e.g., FIG. 5). The latter approach is more elegant, involves time and cost savings, and thus is preferable, in some instances. To the extent that new site-specific recombinases and more potential DNA substrates are identified, each increases the likelihood that one can perform recombination at a target site of interest without having to first introduce the DNA substrate sequence.

[0054] Recombinases can be classified into two distinct families: serine recombinases (e.g., resolvases and invertases) and tyrosine recombinases (e.g., integrases), based on distinct biochemical properties. Serine recombinases and tyrosine recombinases are further divided into bidirectional recombinases and unidirectional recombinases. Examples of bidirectional serine recombinases include, without limitation, β-six, CinH, ParA and γδ; and examples of unidirectional serine recombinases include, without limitation, Bxb1, ϕC31, TP901, TG1, φBT1, R4, φRV1, φFC1, MR11, A118, U153 and gp29. Examples of bidirectional tyrosine recombinases include, without limitation, Cre, FLP, and R; and unidirectional tyrosine recombinases include, without limitation, Lambda, HK101, HK022 and pSAM2. The serine and tyrosine recombinase names stem from the conserved nucleophilic amino acid residue that the recombinase uses to attack the DNA and which becomes covalently linked to the DNA during strand exchange. Recombinases have been used for numerous standard biological applications, including the creation of gene knockouts and the solving of sorting problems.

[0055] The outcome of recombination depends, in part, on the location and orientation of two short DNA sequences that are to be recombined (typically less than 60 bp long). Recombinases bind to these target sequences, which are specific to each recombinase, and are herein referred to as recombinase recognition sites. Recombinases may recombine two identical, repeated recognition sites or two dissimilar, non-identical recognition sites. Thus, as used herein, a recombinase is specific for a pair of recombinase recognition sites when the recombinase can mediate intramolecular inversion, intramolecular excision or intramolecular circularization between two recognition DNA sequences or when the recombinase can mediate intermolecular translocation, or intermolecular integration for two DNA sequences, each containing to one of the two DNA recognition sequences. As used herein, a recombinase may also be said to be specific for a recombinase recognition site when two simultaneous intermolecular translocation reactions are used to drive intermolecular cassette exchange between two recognition DNA sequences on two different DNA molecules. As used herein, a recombinase may also be said to recognize its cognate recombinase recognition sites, which flank or are adjacent to an intervening piece of DNA (e.g., a gene of interest or other genetic element). A piece of DNA is said to be flanked by a pair of recombinase recognition sites when the piece of DNA is located between and immediately adjacent to the sites.

[0056] A subset of the site-specific recombinases provided herein have DNA target sites that are exact or near matches to sequences in natural prokaryotic genomes. Thus, these recombinases can be used directly to engineer the genome of the prokaryotic organism with no prior engineering work. This is particularly valuable, for example, for the introduction of new DNA into a genome (e.g., for research, therapeutic or industrial purposes) and especially for organisms that are otherwise challenging to manipulate with current genetic engineering approaches, such as gram-positive bacteria. Co-transformation of an engineered nucleic acid vector that results in the expression of a recombinase and a donor DNA vector that contains one recombinase recognition site could be used to integrate the donor DNA specifically into the natural bacterial genome at the precise location that naturally contains the second recombinase recognition sequence.

[0057] Having more and new site-specific recombinases also increases the probability of identifying a set of multiple, “orthogonal” site-specific recombinases that act on distinct enough target pair sites that there is no recombination cross-talk. Sets of orthogonal site-specific recombinases are highly useful for engineering genetic “logic circuits” where a logical output (e.g., gene expression, orientation of primer-binding sites, etc.) can be computed by the rearrangement of DNA segments located between unique pairs of recombinase target sites.

[0058] While many site-specific recombinases are known to exhibit recombination activity in vitro, their relative efficiencies differ with respect to recombination in cells or in an organism (in vivo). Site-specific recombinases that are thermostable, and/or contain nuclear localization signals (NLS), have been shown to perform with higher efficiency in vivo, and are therefore of high value, especially if they act on previously unknown target sequences.

[0059] Making specific changes to nucleic acids in vitro, in cells and in multicellular living organisms has been a major focus of the biotechnology community for decades. Precision DNA editing is incredibly important to the research community, which seeks to understand the role that the genome plays in cellular and organismal biology across the many kingdoms of life. Genome editing is also relevant to healthcare because it can serve as the basis for many therapeutic strategies. For example, gene editing tools may be used to re-program immune cells in order that they seek out and eliminate cancer cells; make specific edits to patients' genomes to correct for disease-causing mutations; and engineer bacteriophage viruses such that they seek out and eliminate bacterial infections, among many other applications. Lastly, genome editing is important for the biotechnology industry as a whole. The agricultural industry has made genetically-engineered crops designed to better withstand harsh environmental conditions, such as drought or the presence of pathogens, and the genomes of domesticated animals have been modified to facilitate safe food production, for example.

[0060] Inversion recombination happens between a pair of short recombinase target DNA sequences on the same molecule in “head-to-head” relative orientation. A DNA loop formation brings the two target sequences together at a point of strand-exchange. The end result of such an inversion recombination event is that the stretch of DNA between the target sites inverts (i.e., the stretch of DNA reverses orientation). In such reactions, the DNA is conserved with no net gain or loss of DNA or its bonds.

[0061] Conversely, excision recombination occurs between two short DNA target sequences on the same molecule that are oriented in the same direction. In this case, the intervening DNA is excised/removed as a DNA circle. Thus, excision recombination may be used to circularize an intervening DNA sequence that is flanked by DNA recognition sequences while simultaneously resulting in excision of the intervening DNA sequence from the parent DNA molecule, which may be linear or circular.

[0062] Translocation recombination occurs between two short DNA recognition sequences that are oriented in the same direction but are located on two distinct DNA molecules. In this case, the DNA sequence that is located downstream of the 3′ end of one of the recognition sequences is exchanged with the DNA located downstream of the 3′ end of the other corresponding recognition sequence on a second DNA molecule. Thus, translocation recombinase may be used to generate chimeric DNA molecules consisting of sub-sequences that originated from distinct parent DNA molecules.

[0063] Integrating recombination occurs between two short DNA recognition sequences that are oriented in the same direction, but are located on two distinct DNA molecules, and where at least one of the DNA molecules is circular. In this case, recombination results in the integration of the circular “donor” DNA in its entirety into the second DNA molecule, which may be circular or linear, at the recognition sequence site.

[0064] Intermolecular cassette exchange occurs between 4 short DNA recognition sequences that are all oriented in the same direction, but where 2 short recognition sequences flank an intervening DNA sequence on one molecule and the other 2 short recognition sequences flank an intervening DNA sequence on a second DNA molecule. The 4 short recognition sequences can consist of two identical pairs of recognition sites for a given site-specific recombinase or can consist of two distinct recognition site pairs, where one pairing is at the 5′ end of the intervening DNA sequence on both molecules and one pair is at the 3′ end of the intervening DNA sequence on both molecules. Simultaneous or serial translocation reactions result in the precise intermolecular exchange of the intervening DNA sequence between the two pairs of flanking recognition sequences. Thus, cassette exchange may be used to replace a particular stretch of DNA with new donor DNA without requiring the integration of the complete donor DNA molecule, as what occurs in integrating recombination.

[0065] Recombinases can also be classified as irreversible or reversible. An irreversible recombinase refers to a recombinase that can catalyze recombination between two complementary recombination sites, but cannot catalyze recombination between the hybrid sites that are formed by this recombination without the assistance of an additional factor. Thus, an irreversible recognition site is a recombinase recognition site that can serve as the first of two DNA recognition sequences for an irreversible recombinase and that is modified to a hybrid recognition site following recombination at that site. A complementary irreversible recognition site is a recombinase recognition site that can serve as the second of two DNA recognition sequences for an irreversible recombinase and that is modified to a hybrid recombination site following recombination at that site. For example, attB and attP, are the irreversible recombination sites for Bxb1 and phiC31 recombinases—attB is the complementary irreversible recombination site of attP, and vice versa. The attB/attP sites can be mutated to create orthogonal B/P pairs that only interact with each other but not the other mutants. This allows a single recombinase to control the excision or integration or inversion of multiple orthogonal B/P pairs.

[0066] The phiC31 (φC31) integrase, for example, catalyzes only the attB x attP reaction in the absence of an additional factor not found in eukaryotic cells. The recombinase cannot mediate recombination between the attL and attR hybrid recombination sites that are formed upon recombination between attB and attP. Because recombinases such as the phiC31 integrase cannot alone catalyze the reverse reaction, the phiC31 attB x attP recombination is stable.

[0067] Irreversible recombinases, and nucleic acids that encode the irreversible recombinases, are described in the art and can be obtained using routine methods. Examples of irreversible recombinases include, without limitation, phiC31 (φC31) recombinase, coliphage P4 recombinase, coliphage lambda integrase, Listeria A118 phage recombinase, and actinophage R4 Sre recombinase, HK101, HK022, pSAM2, Bxb1, TP901, TG1, φBT1, φRV1, φFC1, MR11, U153 and gp29.

[0068] Conversely, a reversible recombinase is a recombinase that can catalyze recombination between two complementary recombinase recognition sites and, without the assistance of an additional factor, can catalyze recombination between the sites that are formed by the initial recombination event, thereby reversing it. The product-sites generated by recombination are themselves substrates for subsequent recombination. Examples of reversible recombinase systems include, without limitation, the Cre-lox and the Flp-frt systems, R, β-six, CinH, ParA and γδ.

[0069] The recombinases provided herein are not meant to be exclusive examples of recombinases that can be used in embodiments of the present disclosure. The complexity of logic and memory systems of the present disclosure can be expanded by mining databases for new orthogonal recombinases or designing synthetic recombinases with defined DNA specificities. Other examples of recombinases that are useful are known to those of skill in the art, and any new recombinase that is discovered or generated is expected to be able to be used in the different embodiments of the present disclosure.

[0070] In some embodiments, the recombinase is serine or tyrosine integrase. Thus, in some embodiments, the recombinase is considered to be irreversible. In some embodiments, the recombinase is a serine or tyrosine invertase, resolvase or transposase. Thus, in some embodiments, the recombinase is considered to be reversible. Unidirectional recombinases bind to non-identical recognition sites and therefore mediate irreversible recombination. Examples of unidirectional recombinase recognition sites include attB, attP, attL, attR, pseudo attB, and pseudo attP. In some embodiments, the circuits described herein comprise unidirectional recombinases.

[0071] Examples of unidirectional recombinases include but are not limited to Bxb1, PhiC31, TP901, HK022, HP1, R4, Int1, Int2, Int3, Int4, Int5, Int6, Int7, Int8, Int9, Int10, Int11, Int12, Int13, Int14, Int15, Int16, Int17, Int18, Int19, Int20, Int21, Int22, Int23, Int24, Int25, Int26, Int27, Int28, Int29, Int30, Int31, Int32, Int33, and Int34. Further unidirectional recombinases may be identified using the methods disclosed in Yang et al., Nature Methods, October 2014; 11(12), pp. 1261-1266, herein incorporated by reference in its entirety.

[0072] Examples of bidirectional recombinases include, but are not limited to, Cre, FLP, R, IntA, Tn3 resolvase, Hin invertase and Gin invertase.

[0073] In some embodiments, a recombinase is a bacterial recombinase. Non-limiting examples of bacterial recombinases include FimE, FimB, FimA and HbiF. HbiF is a recombinase that reverses recombination sites that have been inverted by Fim recombinases. Bacterial recombinases can recognize inverted repeat sequences, termed inverted repeat right (IRR) and inverted repeat left (IRL).

[0074] Some aspects of the present disclosure provide engineered recombinases comprising an amino acid sequence having at least 70% identity to an amino acid sequence of any one of SEQ ID NOs: 1-395. For example, an engineered recombinase may comprise an amino acid sequence having at least 75%, at least 80%, at least 85%, at least 90%, at least 95%, at least 96%, at least 97%, at least 98%, at least 99%, or 100% identity to an amino acid sequence of any one of SEQ ID NOs: 1-395. In some embodiments, an engineered recombinase comprises an amino acid sequence having 70%-80%, 70%-90%, 70%-100%, 80%-90%, 80%400%, or 90%-100% identity to an amino acid sequence of any one of SEQ ID NOs: 1-395.

[0075] “Identity” refers to a relationship between the sequences of two or more polypeptides (e.g. recombinases) or polynucleotides (nucleic acids), as determined by comparing the sequences. Identity also refers to the degree of sequence relatedness between or among sequences as determined by the number of matches between strings of two or more amino acid residues or nucleic acid residues. Identity measures the percent of identical matches between the smaller of two or more sequences with gap alignments (if any) addressed by a particular mathematical model or computer program (e.g., “algorithms”) Identity of related polypeptides or nucleic acids can be readily calculated by known methods. “Percent (%) identity” as it applies to polypeptide or polynucleotide sequences is defined as the percentage of residues (amino acid residues or nucleic acid residues) in the candidate amino acid or nucleic acid (nucleotide) sequence that are identical with the residues in the amino acid sequence or nucleic acid sequence of a second sequence after aligning the sequences and introducing gaps, if necessary, to achieve the maximum percent identity. Methods and computer programs for the alignment are well known in the art. It is understood that identity depends on a calculation of percent identity but may differ in value due to gaps and penalties introduced in the calculation. Generally, a particular polynucleotide or polypeptide (e.g., recombinase) has at least 40%, 45%, 50%, 55%, 60%, 65%, 70%, 75%, 80%, 85%, 90%, 91%, 92%, 93%, 94%, 95%, 96%, 97%, 98%, 99% but less than 100% sequence identity to that particular reference polynucleotide or polypeptide as determined by sequence alignment programs and parameters described herein and known to those skilled in the art. Such tools for alignment include those of the BLAST suite (Stephen F. Altschul, et al (1997), “Gapped BLAST and PSI-BLAST: a new generation of protein database search programs”, Nucleic Acids Res. 25:3389-3402). Another popular local alignment technique is based on the Smith-Waterman algorithm (Smith, T. F. & Waterman, M. S. (1981) “Identification of common molecular subsequences.” J. Mol. Biol. 147:195-197). A general global alignment technique based on dynamic programming is the Needleman-Wunsch algorithm (Needleman, S. B. & Wunsch, C. D. (1970) “A general method applicable to the search for similarities in the amino acid sequences of two proteins.” J. Mol. Biol. 48:443-453). More recently a Fast Optimal Global Sequence Alignment Algorithm (FOGSAA) has been developed that purportedly produces global alignment of nucleotide and protein sequences faster than other optimal global alignment methods, including the Needleman-Wunsch algorithm.

[0076] Engineered Nucleic Acids

[0077] Aspects of the present disclosure provide engineered nucleic acids encoding a recombinase as described herein. In some embodiments, an engineered nucleic encodes a recombinase comprising an amino acid sequence having at least 70% identity to an amino acid sequence of any one of SEQ ID NOs: 1-395. For example, an engineered nucleic may encode a recombinase comprising an amino acid sequence having at least 75%, at least 80%, at least 85%, at least 90%, at least 95%, at least 96%, at least 97%, at least 98%, at least 99%, or 100% identity to an amino acid sequence of any one of SEQ ID NOs: 1-395. In some embodiments, an engineered nucleic encodes a recombinase comprising an amino acid sequence having 70%-80%, 70%-90%, 70%-100%, 80%-90%, 80%-100%, or 90%-100% identity to an amino acid sequence of any one of SEQ ID NOs: 1-395.

[0078] A nucleic acid is at least two nucleotides covalently linked together, and in some instances, may contain phosphodiester bonds (e.g., a phosphodiester “backbone”). An engineered nucleic acid is a nucleic acid that does not occur in nature. It should be understood, however, that while an engineered nucleic acid as a whole is not naturally-occurring, it may include nucleotide sequences that occur in nature. In some embodiments, an engineered nucleic acid comprises nucleotide sequences from different organisms (e.g., from different species). For example, in some embodiments, an engineered nucleic acid includes a murine nucleotide sequence, a bacterial nucleotide sequence, a human nucleotide sequence, and/or a viral nucleotide sequence. Engineered nucleic acids include recombinant nucleic acids and synthetic nucleic acids. A recombinant nucleic acid is a molecule that is constructed by joining nucleic acids (e.g., isolated nucleic acids, synthetic nucleic acids or a combination thereof) and, in some embodiments, can replicate in a living cell. A synthetic nucleic acid is a molecule that is amplified or chemically, or by other means, synthesized. A synthetic nucleic acid includes those that are chemically modified, or otherwise modified, but can base pair with naturally-occurring nucleic acid molecules. Recombinant and synthetic nucleic acids also include those molecules that result from the replication of either of the foregoing.

[0079] In some embodiments, a nucleic acid of the present disclosure is considered to be a nucleic acid analog, which may contain, at least in part, other backbones comprising, for example, phosphoramide, phosphorothioate, phosphorodithioate, O-methylphophoroamidite linkages and/or peptide nucleic acids. A nucleic acid may be single-stranded (ss) or double-stranded (ds), as specified, or may contain portions of both single-stranded and double-stranded sequence. In some embodiments, a nucleic acid may contain portions of triple-stranded sequence. A nucleic acid may be DNA, both genomic and/or cDNA, RNA or a hybrid, where the nucleic acid contains any combination of deoxyribonucleotides and ribonucleotides (e.g., artificial or natural), and any combination of bases, including uracil, adenine, thymine, cytosine, guanine, inosine, xanthine, hypoxanthine, isocytosine and isoguanine.

[0080] Engineered nucleic acids of the present disclosure may include one or more genetic elements. A genetic element is a particular nucleotide sequence that has a role in nucleic acid expression (e.g., promoter, enhancer, terminator) or encodes a discrete product of an engineered nucleic acid.

[0081] Engineered nucleic acids of the present disclosure may be produced using standard molecular biology methods (see, e.g., Green and Sambrook, Molecular Cloning, A Laboratory Manual, 2012, Cold Spring Harbor Press).

[0082] In some embodiments, engineered nucleic acids are produced using GIBSON ASSEMBLY® Cloning (see, e.g., Gibson, D. G. et al. Nature Methods, 343-345, 2009; and Gibson, D. G. et al. Nature Methods, 901-903, 2010, each of which is incorporated by reference herein). GIBSON ASSEMBLY® typically uses three enzymatic activities in a single-tube reaction: 5′ exonuclease, the 3′ extension activity of a DNA polymerase and DNA ligase activity. The 5′ exonuclease activity chews back the 5′ end sequences and exposes the complementary sequence for annealing. The polymerase activity then fills in the gaps on the annealed regions. A DNA ligase then seals the nick and covalently links the DNA fragments together. The overlapping sequence of adjoining fragments is much longer than those used in Golden Gate Assembly, and therefore results in a higher percentage of correct assemblies.

[0083] Also provided herein are vectors comprising engineered nucleic acids. A vector is a nucleic acid (e.g., DNA) used as a vehicle to artificially carry genetic material (e.g., an engineered nucleic acid) into another cell where, for example, it can be replicated and/or expressed. In some embodiments, a vector is an episomal vector (see, e.g., Van Craenenbroeck K. et al. Eur. J. Biochem. 267, 5665, 2000, incorporated by reference herein). A non-limiting example of a vector is a plasmid. Plasmids are double-stranded generally circular DNA sequences that are capable of automatically replicating in a host cell. Plasmid vectors typically contain an origin of replication that allows for semi-independent replication of the plasmid in the host and also the transgene insert. Plasmids may have more features, including, for example, a multiple cloning site, which includes nucleotide overhangs for insertion of a nucleic acid insert, and multiple restriction enzyme consensus sites to either side of the insert. Another non-limiting example of a vector is a viral vector.

[0084] A nucleic acid, in some embodiments, comprises a promoter operably linked to a nucleotide sequence encoding the recombinase. A promoter is a control region of a nucleic acid sequence at which initiation and rate of transcription of the remainder of a nucleic acid sequence are controlled. A promoter may also contain sub-regions at which regulatory proteins and molecules may bind, such as RNA polymerase and other transcription factors. Promoters may be constitutive, inducible, activatable, repressible, tissue-specific or any combination thereof.

[0085] A promoter drives expression or drives transcription of the nucleic acid sequence that it regulates. Herein, a promoter is considered to be operably linked when it is in a correct functional location and orientation in relation to a nucleotide sequence it regulates to control (“drive”) transcriptional initiation and/or expression of that sequence.

[0086] A promoter may be one naturally associated with a gene or sequence, as may be obtained by isolating the 5′ non-coding sequences located upstream of the coding segment of a given gene or sequence. Such a promoter is referred to as an endogenous promoter.

[0087] In some embodiments, a coding nucleic acid sequence may be positioned under the control of a recombinant or heterologous promoter, which refers to a promoter that is not normally associated with the encoded sequence in its natural environment. Such promoters may include promoters of other genes; promoters isolated from any other cell; and synthetic promoters or enhancers that are not naturally occurring such as, for example, those that contain different elements of different transcriptional regulatory regions and/or mutations that alter expression through methods of genetic engineering that are known in the art. In addition to producing nucleic acid sequences of promoters and enhancers synthetically, sequences may be produced using recombinant cloning and/or nucleic acid amplification technology, including polymerase chain reaction (PCR) (see U.S. Pat. Nos. 4,683,202 and 5,928,906).

[0088] Contemplated herein, in some embodiments, are RNA pol II and RNA pol III promoters. Promoters that direct accurate initiation of transcription by an RNA polymerase II are referred to as RNA pol II promoters. Examples of RNA pol II promoters for use in accordance with the present disclosure include, without limitation, human cytomegalovirus promoters, human ubiquitin promoters, human histone H2A1 promoters and human inflammatory chemokine CXCL 1 promoters. Other RNA pol II promoters are also contemplated herein. Promoters that direct accurate initiation of transcription by an RNA polymerase III are referred to as RNA pol III promoters. Examples of RNA pol III promoters for use in accordance with the present disclosure include, without limitation, a U6 promoter, a H1 promoter and promoters of transfer RNAs, 5S ribosomal RNA (rRNA), and the signal recognition particle 7SL RNA.

[0089] Promoters of an engineered nucleic acids may be inducible promoters, which are promoters that are characterized by regulating (e.g., initiating or activating) transcriptional activity when in the presence of, influenced by or contacted by an inducer signal. An inducer signal may be endogenous or a normally exogenous condition (e.g., light), compound (e.g., chemical or non-chemical compound) or protein that contacts an inducible promoter in such a way as to be active in regulating transcriptional activity from the inducible promoter. An inducible promoter of the present disclosure may be induced by (or repressed by) one or more physiological condition(s), such as changes in light, pH, temperature, radiation, osmotic pressure, saline gradients, cell surface binding, and the concentration of one or more extrinsic or intrinsic inducing agent(s). Non-limiting examples of inducible promoters include, without limitation, chemically/biochemically-regulated and physically-regulated promoters such as alcohol-regulated promoters, tetracycline-regulated promoters (e.g., anhydrotetracycline (aTc)-responsive promoters and other tetracycline-responsive promoter systems, which include a tetracycline repressor protein (tetR), a tetracycline operator sequence (tetO) and a tetracycline transactivator fusion protein (tTA)), steroid-regulated promoters (e.g., promoters based on the rat glucocorticoid receptor, human estrogen receptor, moth ecdysone receptors, and promoters from the steroid/retinoid/thyroid receptor superfamily), metal-regulated promoters (e.g., promoters derived from metallothionein (proteins that bind and sequester metal ions) genes from yeast, mouse and human), pathogenesis-regulated promoters (e.g., induced by salicylic acid, ethylene or benzothiadiazole (BTH)), temperature/heat-inducible promoters (e.g., heat shock promoters), and light-regulated promoters (e.g., light responsive promoters from plant cells). Other inducible promoter systems are known in the art and may be used in accordance with the present disclosure.

[0090] An engineered nucleic acid, in some embodiments, comprises a gene of interest flanked by recombinase recognition sites. In some embodiments, the gene of interest is a marker gene encoding, for example, a detectable marker protein or a selectable marker protein. Examples of detectable marker proteins include, without limitation, fluorescent proteins (e.g., GFP, EGFP, sfGFP, TagGFP, Turbo GFP, AcGFP, ZsGFP, Emerald, Azami green, mWasabi, T-Sapphire, EBFP, EBFP2, Azurite, mTagBFP, ECFP, mECFP, Cerulean, mTurquoise, CyPet, AmCyanl, Midori-ishi Cyan, TagCFP, mTFP1, EYFP, Topaz, Venus, mCitrine, YPET, TagYFP, PhiYFP, ZsYellow1, mBanana, Kusabira Orange, Orange2, mOrange, mOrange2, dTomato, dTomato-Tandem, TagRFP, TagRFP-T, DsRed, DsRed2, DsRed-Express (T1), DsRed-Monomer, mTangerine, mRuby, mApple, mStrawberry, AsRed2, mRFP1, JRed, mCherry, HcRedl, mRaspberry, dKeima-Tandem, HcRed-Tandem, mPlum, AQ143 and variants thereof). Examples of selectable marker proteins include, without limitation, dihydrofolate reductase, glutamine synthetase, hygromycin phosphotransferase, puromycin N-acetyltransferase, and neomycin phosphotransferase.

[0091] Cells

[0092] Some aspects of the present disclosure provide cell comprising and/or expressing the engineered recombinase, engineered nucleic acid, and/or vector described herein. In some embodiments, engineered nucleic acids of the present disclosure are expressed in a broad range of cell types. In other embodiments, the recombinases and their cognate recognition site pairs are used to modify a broad range of cell types. In some embodiments, engineered nucleic acids are expressed in and/or the recombinases are used to modify plants cells, bacterial cells, yeast cells, insect cells, mammalian cells, or other types of cells. Any one of the foregoing types of cells may be transgenic cells.

[0093] Plants have been increasingly used as alternative recombinant protein expression system. There are three broad plant production systems: whole plant, culture of organized plant tissues and plant cell culture. All these three systems are able to produce recombinant proteins with complex glycosylation patterns and post-translational modification. Thus, plants and plant cells may be used to produce the recombinases described herein. Alternatively (or in addition), the recombinases and their cognate recognitions site pairs may be used to genetically modified plants (e.g., crops) used in agriculture, for example, to introduce a new trait to the plant.

[0094] Bacterial cells of the present disclosure include bacterial subdivisions of Eubacteria and Archaebacteria. Eubacteria can be further subdivided into gram-positive and gram-negative Eubacteria, which depend upon a difference in cell wall structure. Also included herein are those classified based on gross morphology alone (e.g., cocci, bacilli). In some embodiments, the bacterial cells are Gram-negative cells, and in some embodiments, the bacterial cells are Gram-positive cells. Examples of bacterial cells of the present disclosure include, without limitation, cells from Yersinia spp., Escherichia spp., Klebsiella spp., Acinetobacter spp., Bordetella spp., Neisseria spp., Aeromonas spp., Franciesella spp., Corynebacterium spp., Citrobacter spp., Chlamydia spp., Hemophilus spp., Brucella spp., Mycobacterium spp., Legionella spp., Rhodococcus spp., Pseudomonas spp., Helicobacter spp., Salmonella spp., Vibrio spp., Bacillus spp., Erysipelothrix spp., Salmonella spp., Streptomyces spp., Bacteroides spp., Prevotella spp., Clostridium spp., Bifidobacterium spp., or Lactobacillus spp. In some embodiments, the bacterial cells are from Bacteroides thetaiotaomicron, Bacteroides fragilis, Bacteroides distasonis, Bacteroides vulgatus, Clostridium leptum, Clostridium coccoides, Staphylococcus aureus, Bacillus subtilis, Clostridium butyricum, Brevibacterium lactofermentum, Streptococcus agalactiae, Lactococcus lactis, Leuconostoc lactis, Actinobacillus actinobycetemcomitans, cyanobacteria, Escherichia coli, Helicobacter pylori, Selnomonas ruminatium, Shigella sonnei, Zymomonas mobilis, Mycoplasma mycoides, Treponema denticola, Bacillus thuringiensis, Staphylococcus lugdunensis, Leuconostoc oenos, Corynebacterium xerosis, Lactobacillus plantarum, Lactobacillus rhamnosus, Lactobacillus casei, Lactobacillus acidophilus, Streptococcus spp., Enterococcus faecalis, Bacillus coagulans, Bacillus ceretus, Bacillus popillae, Synechocystis strain PCC6803, Bacillus liquefaciens, Pyrococcus abyssi, Selenomonas nominantium, Lactobacillus hilgardii, Streptococcus ferus, Lactobacillus pentosus, Bacteroides fragilis, Staphylococcus epidermidis, Zymomonas mobilis, Streptomyces phaechromogenes, or Streptomyces ghanaenis. Endogenous bacterial cells refer to non-pathogenic bacteria that are part of a normal internal ecosystem such as bacterial flora.

[0095] In some embodiments, bacterial cells of the disclosure are anaerobic bacterial cells (e.g., cells that do not require oxygen for growth). Anaerobic bacterial cells include facultative anaerobic cells such as, for example, Escherichia coli, Shewanella oneidensis and Listeria monocytogenes. Anaerobic bacterial cells also include obligate anaerobic cells such as, for example, Bacteroides and Clostridium species. In humans, for example, anaerobic bacterial cells are most commonly found in the gastrointestinal tract.

[0096] In some embodiments, the cells are mammalian cells. Non-limiting examples of mammalian cells include human cells, primate cells (e.g., vero cells), rat cells (e.g., GH3 cells, 0C23 cells), and mouse cells (e.g., MC3T3 cells). There are a variety of human cell lines, including, without limitation, human embryonic kidney (HEK) cells, HeLa cells, cancer cells from the National Cancer Institute's 60 cancer cell lines (NCI60), DU145 (prostate cancer) cells, Lncap (prostate cancer) cells, MCF-7 (breast cancer) cells, MDA-MB-438 (breast cancer) cells, PC3 (prostate cancer) cells, T47D (breast cancer) cells, THP-1 (acute myeloid leukemia) cells, U87 (glioblastoma) cells, SHSYSY human neuroblastoma cells (cloned from a myeloma) and Saos-2 (bone cancer) cells. In some embodiments, the cells are human embryonic kidney (HEK) cells (e.g., HEK 293 or HEK 293T cells). In some embodiments, the cells are stem cells (e.g., human stem cells) such as, for example, pluripotent stem cells (e.g., human pluripotent stem cells including human induced pluripotent stem cells (hiPSCs)). A stem cell is a cell with the ability to divide for indefinite periods in culture and to give rise to specialized cells. A pluripotent stem cell refers to a type of stem cell that is capable of differentiating into all tissues of an organism, but not alone capable of sustaining full organismal development. A human induced pluripotent stem cell refers to a somatic (e.g., mature or adult) cell that has been reprogrammed to an embryonic stem cell-like state by being forced to express genes and factors important for maintaining the defining properties of embryonic stem cells (see, e.g., Takahashi and Yamanaka, Cell 126 (4): 663-76, 2006, incorporated by reference herein). Human induced pluripotent stem cell cells express stem cell markers and are capable of generating cells characteristic of all three germ layers (ectoderm, endoderm, mesoderm).

[0097] Additional non-limiting examples of cell lines that may be used in accordance with the present disclosure include 293-T, 293-T, 3T3, 4T1, 721, 9L, A-549, A172, A20, A253, A2780, A2780ADR, A2780cis, A431, ALC, B16, B35, BCP-1, BEAS-2B, bEnd.3, BHK-21, BR 293, BxPC3, C2C12, C3H-10T1/2, C6, C6/36, Cal-27, CGR8, CHO, CML T1, CMT, COR-L23, COR-L23/5010, COR-L23/CPR, COR-L23/R23, COS-7, COV-434, CT26, D17, DH82, DU145, DuCaP, E14Tg2a, EL4, EM2, EM3, EMT6/AR1, EMT6/AR10.0, FM3, H1299, H69, HB54, HB55, HCA2, Hepa1c1c7, High Five cells, HL-60, HMEC, HT-29, HUVEC, J558L cells, Jurkat, JY cells, K562 cells, KCL22, KG1, Ku812, KYO1, LNCap, Ma-Mel 1, 2, 3 . . . 48, MC-38, MCF-10A, MCF-7, MDA-MB-231, MDA-MB-435, MDA-MB-468, MDCK II, MG63, MONO-MAC 6, MOR/0.2R, MRCS, MTD-1A, MyEnd, NALM-1, NCI-H69/CPR, NCI-H69/LX10, NCI-H69/LX20, NCI-H69/LX4, NIH-3T3, NW-145, OPCN/OPCT Peer, PNT-1A/PNT 2, PTK2, Raji, RBL cells, RenCa, RIN-5F, RMA/RMAS, S2, Saos-2 cells, Sf21, Sf9, SiHa, SKBR3, SKOV-3, T-47D, T2, T84, THP1, U373, U87, U937, VCaP, WM39, WT-49, X63, YAC-1 and YAR cells.

[0098] Cells of the present disclosure, in some embodiments, are engineered (e.g., genetically modified). An engineered cell contains an exogenous nucleic acid or a nucleic acid that does not occur in nature (e.g., a modified nucleic acid). In some embodiments, an engineered cell contains a mutation in a genomic nucleic acid. In some embodiments, an engineered cell contains an exogenous independently replicating nucleic acid (e.g., an engineered nucleic acid present on an episomal vector). In some embodiments, an engineered cell is produced by introducing a foreign or exogenous nucleic acid (e.g., expressing a recombinase) into a cell. A nucleic acid may be introduced into a cell by conventional methods, such as, for example, electroporation (see, e.g., Heiser W. C. Transcription Factor Protocols: Methods in Molecular Biology™ 2000; 130: 117-134), chemical (e.g., calcium phosphate or lipid) transfection (see, e.g., Lewis W. H., et al., Somatic Cell Genet. 1980 May; 6(3): 333-47; Chen C., et al., Mol Cell Biol. 1987 August; 7(8): 2745-2752), fusion with bacterial protoplasts containing recombinant plasmids (see, e.g., Schaffner W. Proc Natl Acad Sci USA. 1980 April; 77(4): 2163-7), transduction, conjugation, or microinjection of purified DNA directly into the nucleus of the cell (see, e.g., Capecchi M. R. Cell. 1980 November; 22(2 Pt 2): 479-88).

[0099] In some embodiments, a cell is modified to express a reporter molecule. In some embodiments, a cell is modified to express an inducible promoter operably linked to a reporter molecule (e.g., a fluorescent protein such as green fluorescent protein (GFP) or other reporter molecule).

[0100] In some embodiments, a cell is modified to overexpress a recombinase (e.g., via introducing or modifying a promoter or other regulatory element near the endogenous gene that encodes the recombinase to increase its expression level). In some embodiments, a cell is modified by site-specific recombination using the molecules identified herein.

[0101] In some embodiments, an engineered nucleic acid construct may be codon-optimized, for example, for expression in mammalian cells (e.g., human cells) or other types of cells. Codon optimization is a technique to maximize the protein expression in living organism by increasing the translational efficiency of gene of interest by transforming a DNA sequence of nucleotides of one species into a DNA sequence of nucleotides of another species. Methods of codon optimization are well-known.

[0102] Engineered nucleic acid constructs of the present disclosure may be transiently expressed or stably expressed. Transient cell expression refers to expression by a cell of a nucleic acid that is not integrated into the nuclear genome of the cell. By comparison, stable cell expression refers to expression by a cell of a nucleic acid that remains in the nuclear genome of the cell and its daughter cells. Typically, to achieve stable cell expression, a cell is co-transfected with a marker gene and an exogenous nucleic acid (e.g., engineered nucleic acid) that is intended for stable expression in the cell. The marker gene gives the cell some selectable advantage (e.g., resistance to a toxin, antibiotic, or other factor). Few transfected cells will, by chance, have integrated the exogenous nucleic acid into their genome. If a toxin, for example, is then added to the cell culture, only those few cells with a toxin-resistant marker gene integrated into their genomes will be able to proliferate, while other cells will die. After applying this selective pressure for a period of time, only the cells with a stable transfection remain and can be cultured further. Examples of marker genes and selection agents for use in accordance with the present disclosure include, without limitation, dihydrofolate reductase with methotrexate, glutamine synthetase with methionine sulphoximine, hygromycin phosphotransferase with hygromycin, puromycin N-acetyltransferase with puromycin, and neomycin phosphotransferase with Geneticin, also known as G418. Other marker genes/selection agents are contemplated herein.

[0103] Expression of nucleic acids in transiently-transfected and/or stably-transfected cells may be constitutive or inducible. Inducible promoters for use as provided herein are described above.

[0104] Some aspects of the present disclosure provide cells that comprises 1 to 10 engineered nucleic acids (e.g., engineered nucleic acids encoding recombinases). In some embodiments, a cell comprises 1, 2, 3, 4, 5, 6, 7, 8, 9, 10 or more engineered nucleic acids. It should be understood that a cell that comprises an engineered nucleic acid is a cell that comprises copies (more than one) of an engineered nucleic acid. Thus, a cell that comprises at least two engineered nucleic acids is a cell that comprises copies of a first engineered nucleic acid and copies of a second engineered nucleic acid, wherein the first engineered nucleic acid is different from the second engineered nucleic acid. Two engineered nucleic acids may differ from each other with respect to, for example, sequence composition (e.g., type, number and arrangement of nucleotides), length, or a combination of sequence composition and length.

[0105] Some aspects of the present disclosure provide cells that comprises 1 to 10 episomal vectors, or more, each vector comprising, for example, an engineered nucleic acids (e.g., engineered nucleic acids encoding gRNAs). In some embodiments, a cell comprises 1, 2, 3, 4, 5, 6, 7, 8, 9, 10 or more vectors.

[0106] Also provided herein, in some aspects, are methods that comprise introducing into a cell an (e.g., at least one, at least two, at least three, or more) engineered nucleic acid or an episomal vector (e.g., comprising an engineered nucleic acid). As discussed elsewhere herein, an engineered nucleic acid may be introduced into a cell by conventional methods, such as, for example, electroporation, chemical (e.g., calcium phosphate or lipid) transfection, fusion with bacterial protoplasts containing recombinant plasmids, transduction, conjugation, or microinjection of purified DNA directly into the nucleus of the cell.

[0107] In some embodiments, a cell comprises a genomic sequence flanked by recombinase recognition sites cognate to the engineered recombinase.

[0108] Animal Models

[0109] Some aspects of the present disclosure provide animal models comprising cells expressing a recombinase described herein. Other aspects provide methods of producing animal models using the recombinases and cognate recognition site pairs described herein. In some embodiments, an animal model is a rodent model, such as a rat model or a mouse model. In some embodiments, an animal model is a primate model.

[0110] Computer Implementation

[0111] Some aspects of the present disclosure provide a computer implemented process. For example, at least some of the steps of the methods described herein (e.g., FIG. 1) may be implemented in software and carried out by a computing device. The software can be written in any suitable programming language and stored on any suitable recording medium including a computing system hard drive, computing system local memory, a computing network server, a cloud storage, and/or any computer readable medium. In an embodiment, the software may include an artificial intelligence machine learning algorithm, trained on initial data, which learns as more data is fed into the system. The method may be performed by any hardware processor capable of implementing the software steps, such as that of a general purpose computer, as illustrated in block diagram form in FIG. 2.

[0112] In some embodiments, a computer implemented method comprises: mining from a protein database putative recombinase sequences based on conserved recombinase domain architecture or other measure of homology to known recombinases; linking the putative recombinase sequences to prokaryotic genomic sequences containing their corresponding coding sequences; scanning those genomic sequences to identify prophage sequences containing the coding sequences; aligning the prophage sequences and their boundary-flanking sequences with homologous genomic sequences from the same genus to produce sequence alignments; and automatically solve for putative cognate recombinase recognition sites by detecting overlapping sequences in the sequence alignments.

[0113] In some embodiments, the mining is based on a precisely ordered recombinase domain superfamily architecture or other measure of homology to known recombinases.

[0114] In some embodiments, the linking includes accessing a database that comprises annotated records of genomes assembled from long-read nucleotide sequences, short-read nucleotide sequences, or a combination of long- and short-read nucleotide sequences, or directly annotated records of long-read nucleotide sequences.

[0115] In some embodiments, the linking includes automatically removing uninformative nucleotide sequences from the genomic coding sequences.

[0116] In some embodiments, the genomic coding sequences includes at least 2, at least 5, at least 10, at least 25, at least 50, or at least 100 annotated genomic coding sequences.

[0117] In some embodiments, the flanking boundary sequences have a length of at least 20 kilobases.

[0118] In some embodiments, the automatically solving includes defining multiple putative cognate recombinase recognition sites for a single recombinase.

[0119] In some embodiments, the method further comprises verifying that all putative cognate recombinase recognition sites solved flank a sequence encoding at least one of the putative recombinase sequences.

[0120] In an embodiment, the putative recombinase sequences comprise tyrosine and/or serine recombinase, the serine recombinase sequences comprise resolvase and/or integrase sequences.

[0121] Some aspects of the present disclosure provide a computer readable medium on which is stored a computer program which, when implemented by a computer processor, causes the processor to: mine from a protein database putative recombinase sequences based on conserved recombinase domain architecture or other measure of homology to known recombinases; link the putative recombinase sequences to prokaryotic genomic sequences containing their corresponding coding sequences; scan those genomic sequences to identify prophage sequences containing the coding sequences; align the prophage sequences and their boundary-flanking sequences with homologous genomic sequences from the same genus to produce sequence alignments; and automatically solve for putative cognate recombinase recognition sites by detecting overlapping sequences in the sequence alignments.

[0122] FIG. 1 is a flow chart of an illustrative process for discovering recombinases and cognate recognition site pairs, in accordance with some embodiments of the technology described herein. The process may be performed on any suitable computing device(s) (e.g., a single computing device, multiple computing devices co-located in a single physical location or located in multiple physical locations remote from one another, one or more computing devices part of a cloud computing system, etc.), as aspects of the technology described herein are not limited in this respect.

[0123] Step 1 includes identifying putative homologs of recombines genes by precise ordering of conserved domains (domain architecture). Step 2 includes retrieving putative recombinase coding sequence(s) in sequence database(s). Step 3 includes detecting prophages containing the putative recombinase coding sequence(s) within genomic region(s) and extracting these sequences with long flanking regions (allowing for an error-margin in prophage coordinate prediction). Step 4 (optionally designed for automation) includes aligning the extracted sequences against reference genomes and identifying genomic homologs that lack prophages, and optionally a broad secondary search for enhanced discovery. Steps 5 and 6 include automatically searching for overlaps between left and right prophage alignment ranges to identify putative core region(s) of recombinase substrates (Step 5), and solving for complete cognate recombination sites, while reporting confidence measures, handling ambiguity, and including multiple quality control steps (Step 6). Steps 1-6 may be implemented in a continuous scanning mode whereby sequencing databases are accessed routinely and the results refreshed based on newly reported/deposited sequences.

[0124] An illustrative implementation of a computer system 1400 that may be used in connection with any of the embodiments of the technology described herein is shown in FIG. 2. The computer system 1400 includes one or more processors 1410 and one or more articles of manufacture that comprise non-transitory computer-readable storage media (e.g., memory 1420 and one or more non-volatile storage media 1430). The processor 1410 may control writing data to and reading data from the memory 1420 and the non-volatile storage device 1430 in any suitable manner, as the aspects of the technology described herein are not limited in this respect. To perform any of the functionality described herein, the processor 1410 may execute one or more processor-executable instructions stored in one or more non-transitory computer-readable storage media (e.g., the memory 1420), which may serve as non-transitory computer-readable storage media storing processor-executable instructions for execution by the processor 1410.

[0125] Computing device 1400 may also include a network input/output (I/O) interface 1440 via which the computing device may communicate with other computing devices (e.g., over a network), and may also include one or more user I/O interfaces 1450, via which the computing device may provide output to and receive input from a user. The user I/O interfaces may include devices such as a keyboard, a mouse, a microphone, a display device (e.g., a monitor or touch screen), speakers, a camera, and/or various other types of I/O devices.

[0126] The above-described embodiments can be implemented in any of numerous ways. For example, the embodiments may be implemented using hardware, software or a combination thereof. When implemented in software, the software code can be executed on any suitable processor (e.g., a microprocessor) or collection of processors, whether provided in a single computing device or distributed among multiple computing devices. It should be appreciated that any component or collection of components that perform the functions described above can be generically considered as one or more controllers that control the above-discussed functions. The one or more controllers can be implemented in numerous ways, such as with dedicated hardware, or with general purpose hardware (e.g., one or more processors) that is programmed using microcode or software to perform the functions recited above.

[0127] In this respect, it should be appreciated that one implementation of the embodiments described herein comprises at least one computer-readable storage medium (e.g., RAM, ROM, EEPROM, flash memory or other memory technology, CD-ROM, digital versatile disks (DVD) or other optical disk storage, magnetic cassettes, magnetic tape, magnetic disk storage or other magnetic storage devices, or other tangible, non-transitory computer-readable storage medium) encoded with a computer program (i.e., a plurality of executable instructions) that, when executed on one or more processors, performs the above-discussed functions of one or more embodiments. The computer-readable medium may be transportable such that the program stored thereon can be loaded onto any computing device to implement aspects of the techniques discussed herein. In addition, it should be appreciated that the reference to a computer program which, when executed, performs any of the above-discussed functions, is not limited to an application program running on a host computer. Rather, the terms computer program and software are used herein in a generic sense to reference any type of computer code (e.g., application software, firmware, microcode, or any other form of computer instruction) that can be employed to program one or more processors to implement aspects of the techniques discussed herein.

[0128] Applications

[0129] One application of the present disclosure includes natural recombinase:recognition site pair discovery for training a machine learning model that learns the relationship between a recombinase's amino acid sequence and the DNA substrates it recognizes and recombines. The generation of engineered (re-programmed) recombinases that recombine at DNA targets not previously known to be targeted in nature is a long-standing challenge in protein design. Prior to the implementation of the present method, there were not enough examples from nature for a machine learning model of recombinase:recognition site pair to be successfully trained. However, as this continuously-operating, fully-automated method discovers new, naturally occurring recombinase:recognition site pairs, it is assembling a training set from nature that is indeed big enough to train a machine learning algorithm on this dataset. This model could then be used to predict the amino acid sequence of one or more candidate recombinase enzymes that would recognize arbitrary DNA targets of a user's choosing. The model could also be used to predict the amino acid sequence of a recombinase that would avoid and have no activity on one or more arbitrary DNA targets of a user's choosing. Machine-generated predictions may be explicitly tested such that an empirical target specificity profile and/or quantitative recombinase assay measurement is gathered for each machine-generated recombinase sequence. Empirical data describing the activity of machine-generated recombinases on recognition site pairs of interest may be use to further train and refine the model. In this manner, over iterative cycles of (i) prediction, and (ii) experimentation, the model's performance will be enhanced such that it can make increasingly accurate and predictions of recombinase amino acid sequences that have high specificity for a recognition site of interest. In some embodiments, the aforementioned machine learning model that predicts new recombinase sequences is a generative model that is informed, at least in part, by the three-dimensional structure of a recombinase enzyme, or recombinase enzyme sub-type (e.g. large phage serine integrase), such that newly predicted sequences have increased likelihood of folding into a recombinase-like structure and therefore, having recombinase-like function.

[0130] Another application of the present disclosure includes identifying ideal starting protein variants for directed evolution of re-programmable recombinases. The generation of engineered (re-programmed) recombinases that recombine at DNA targets not previously known to be targeted in nature is a long-standing challenge in protein design. Prior to the implementation of the present method, practitioners of directed evolution for recombinases performed directed evolution on a small number of site-specific recombinases, regardless of how far their native sequences deviated from the desired target sequence. The more divergent a target sequence is from the native sequence on which a recombinase has activity, the more arduous engineering is likely required to reprogram the DNA recognition. Therefore, generation of a long list of natural recombinase:recognitoin site pairs offers more flexibility in that one may choose a natural recombinase with a target site as close as possible to a desirable site, necessitating less engineering during reprogramming.

[0131] Yet another application of the present disclosure includes modifying the genome of cells using any of the engineered recombinases described herein.

[0132] Kits

[0133] Some aspects of the present disclosure provide kits. The kits may comprise, for example, an engineered recombinase, engineered nucleic acid, and/or vector described herein. In some embodiments, the kits further comprise a cell transfection reagent.

[0134] The kits described herein may include one or more containers housing components for performing the methods described herein and optionally instructions of uses. Kits for research purposes may contain the components in appropriate concentrations or quantities for running various experiments. Any of the kits described herein may further comprise components needed for performing the methods.

[0135] Each components of the kits, where applicable, may be provided in liquid form (e.g., in solution), or in solid form, (e.g., a dry powder). In certain cases, some of the components may be lyophilized, reconstituted, or processed (e.g., to an active form), for example, by the addition of a suitable solvent or other species (for example, water or certain organic solvents), which may or may not be provided with the kit.

[0136] In some embodiments, the kits may optionally include instructions and/or promotion for use of the components provided. Instructions can define a component of instruction and/or promotion, and typically involve written instructions on or associated with packaging of the disclosure. Instructions also can include any oral or electronic instructions provided in any manner such that a user will clearly recognize that the instructions are to be associated with the kit, for example, audiovisual (e.g., videotape, DVD, etc.), Internet, and/or web-based communications, etc. The written instructions may be in a form prescribed by a governmental agency regulating the manufacture, use or sale of pharmaceuticals or biological products, which can also reflect approval by the agency of manufacture, use or sale for animal administration. As used herein, “promoted” includes all methods of doing business including methods of education, hospital and other clinical instruction, scientific inquiry, drug discovery or development, academic research, pharmaceutical industry activity including pharmaceutical sales, and any advertising or other promotional activity including written, oral and electronic communication of any form, associated with the invention. Additionally, the kits may include other components depending on the specific application, as described herein.

[0137] The kits may contain any one or more of the components described herein in one or more containers. The components may be prepared sterilely, packaged in syringe and shipped refrigerated. Alternatively, it may be housed in a vial or other container for storage. A second container may have other components prepared sterilely. Alternatively, the kits may include the active agents premixed and shipped in a vial, tube, or other container.

[0138] The kits may have a variety of forms, such as a blister pouch, a shrink wrapped pouch, a vacuum sealable pouch, a sealable thermoformed tray, or a similar pouch or tray form, with the accessories loosely packed within the pouch, one or more tubes, containers, a box or a bag. The kits may be sterilized after the accessories are added, thereby allowing the individual accessories in the container to be otherwise unwrapped. The kits can be sterilized using any appropriate sterilization techniques, such as radiation sterilization, heat sterilization, or other sterilization methods known in the art. The kits may also include other components, depending on the specific application, for example, containers, cell media, salts, buffers, reagents, syringes, needles, a fabric, such as gauze, for applying or removing a disinfecting agent, disposable gloves, a support for the agents prior to administration etc.

### ADDITIONAL EMBODIMENTS

[0139] Additional embodiments of the present disclosure are encompassed by the following numbered paragraphs.

[0140] 1. A method comprising:

[0141] mining from a protein database putative recombinase sequences based on conserved recombinase domain architecture or other measure of homology to known recombinases;

[0142] linking the putative recombinase sequences to prokaryotic genomic sequences containing their corresponding coding sequences;

[0143] scanning those genomic sequences to identify prophage sequences containing the coding sequences;

[0144] aligning the prophage sequences and their boundary-flanking sequences with homologous genomic sequences, optionally, from the same genus to produce sequence alignments; and

[0145] automatically solving for putative cognate recombinase recognition sites by detecting overlapping sequences in the sequence alignments, thereby producing a solved recombinase list.

[0146] 2. The method of paragraph 1, wherein the mining is based on a precisely ordered recombinase domain superfamily architecture or other measure of homology to known recombinases.

[0147] 3. The method of paragraph 1 or 2, wherein the linking includes accessing a database that comprises annotated records of genomes assembled from long-read nucleotide sequences, short-read nucleotide sequences, or a combination of long- and short-read nucleotide sequences, or directly annotated records of long-read nucleotide sequences.

[0148] 4. The method of any one of the preceding paragraphs, wherein the linking includes automatically removing uninformative nucleotide sequences from the genomic coding sequences.

[0149] 5. The method of any one of the preceding paragraphs, wherein the genomic coding sequences includes at least 2, at least 5, at least 10, at least 25, at least 50, or at least 100 annotated genomic coding sequences.

[0150] 6. The method of any one of the preceding paragraphs, wherein the boundary-flanking sequences have a length of at least 20 kilobases.

[0151] 7. The method of any one of the preceding paragraphs, wherein the automatically solving includes defining multiple putative cognate recombinase recognition sites for a single recombinase.

[0152] 8. The method of any one of the preceding paragraphs, wherein the automatically solving includes implementation of an algorithm that includes a measure of confidence in each predicted recombinase recognition site set, optionally in the form of ambiguity scores.

[0153] 9. The method of any one of the preceding paragraphs, further comprising verifying that all putative cognate recombinase recognition sites solved flank a sequence encoding at least one of the putative recombinase sequences.

[0154] 10. The method of any one of the preceding paragraphs, wherein the putative recombinase sequences comprise tyrosine and/or serine recombinase sequences.

[0155] 11. The method of paragraph 10, wherein the serine recombinase sequences comprise resolvase and/or integrase sequences.

[0156] 12. The method of any one of the preceding paragraphs, wherein the method is a computer-implemented method.

[0157] 13. The method of any one of the preceding paragraphs, wherein the entirety of the method is automated.

[0158] 14. The method of any one of the preceding paragraphs, further comprising continuously updating the solved recombinase list as the protein database is updated.

[0159] 15. A computer readable medium on which is stored a computer program which, when implemented by a computer processor, causes the processor to:

[0160] mine from a protein database putative recombinase sequences based on conserved recombinase domain architecture or other measure of homology to known recombinases;

[0161] link the putative recombinase sequences to prokaryotic genomic sequences containing their corresponding coding sequences;

[0162] scan those genomic sequences to identify prophage sequences containing the coding sequences;

[0163] align the prophage sequences and their boundary-flanking sequences with homologous genomic sequences from the same genus to produce sequence alignments; and

[0164] solve for putative cognate recombinase recognition sites by detecting overlapping sequences in the sequence alignments.

[0165] 16. The computer readable medium of paragraph 15, wherein the mining is based on a precisely ordered recombinase domain superfamily architecture or other measure of homology to known recombinases.

[0166] 17. The computer readable medium of paragraph 15 or 16, wherein the linking includes accessing a database that comprises annotated records of genomes assembled from long-read nucleotide sequences, short-read nucleotide sequences, or a combination of long- and short-read nucleotide sequences, or directly annotated records of long-read nucleotide sequences.

[0167] 18. The computer readable medium of any one of paragraphs 15-17, wherein the linking includes automatically removing uninformative nucleotide sequences from the genomic coding sequences.

[0168] 19. The computer readable medium of any one of paragraphs 15-18, wherein the genomic coding sequences includes at least 2, at least 5, at least 10, at least 25, at least 50, or at least 100 annotated genomic coding sequences.

[0169] 20. The computer readable medium of any one of paragraphs 15-19, wherein the boundary-flanking sequences have a length of at least 20 kilobases.

[0170] 21. The computer readable medium of any one of paragraphs 15-20, wherein the solving includes defining multiple putative cognate recombinase recognition sites for a single recombinase.

[0171] 22. The computer readable medium of any one of paragraphs 15-21, wherein the solving includes implementation of an algorithm that includes a measure of confidence in each predicted recombinase recognition site set, optionally in the form of ambiguity scores.

[0172] 23. The computer readable medium of any one of paragraphs 15-22, further comprising verifying that all putative cognate recombinase recognition sites solved flank a sequence encoding at least one of the putative recombinase sequences.

[0173] 24. The computer readable medium of any one of paragraphs 15-23, wherein the putative recombinase sequences comprise tyrosine and/or serine recombinase sequences.

[0174] 25. The computer readable medium of paragraph 24, wherein the serine recombinase sequences comprise resolvase and/or integrase sequences.

[0175] 26. The computer readable medium of any one of paragraphs 15-25, further comprising continuously updating the solved recombinase list as the protein database is updated.

[0176] 27. A system configured to perform:

[0177] mining a protein database putative recombinase sequences based on conserved recombinase domain architecture or other measure of homology to known recombinases;

[0178] linking the putative recombinase sequences to prokaryotic genomic sequences containing their corresponding coding sequences;

[0179] scanning those genomic sequences to identify prophage sequences containing the coding sequences;

[0180] aligning the prophage sequences and their boundary-flanking sequences with homologous genomic sequences from the same genus to produce sequence alignments; and

[0181] solving for putative cognate recombinase recognition sites by detecting overlapping sequences in the sequence alignments.

[0182] 28. The system of paragraph 27, wherein the system is a computer system.

[0183] 29. The system of paragraph 27 or 28, wherein the mining is based on a precisely ordered recombinase domain superfamily architecture or other measure of homology to known recombinases.

[0184] 30. The system of any one of paragraphs 27-29, wherein the linking includes accessing a database that comprises annotated records of genomes assembled from long-read nucleotide sequences, short-read nucleotide sequences, or a combination of long- and short-read nucleotide sequences, or directly annotated records of long-read nucleotide sequences.

[0185] 31. The system of any one of paragraphs 27-30, wherein the linking includes automatically removing uninformative nucleotide sequences from the genomic coding sequences.

[0186] 32. The system of any one of paragraphs 27-31, wherein the genomic coding sequences includes at least 2, at least 5, at least 10, at least 25, at least 50, or at least 100 annotated genomic coding sequences.

[0187] 33. The system of any one of paragraphs 27-32, wherein the boundary-flanking sequences have a length of at least 20 kilobases.

[0188] 34. The system of any one of paragraphs 27-33, wherein the solving includes defining multiple putative cognate recombinase recognition sites for a single recombinase.

[0189] 35. The system of any one of paragraphs 27-34, wherein the solving includes implementation of an algorithm that includes a measure of confidence in each predicted recombinase recognition site set, optionally in the form of ambiguity scores.

[0190] 36. The system of any one of paragraphs 27-35, further comprising verifying that all putative cognate recombinase recognition sites solved flank a sequence encoding at least one of the putative recombinase sequences.

[0191] 37. The system of any one of paragraphs 27-36, wherein the putative recombinase sequences comprise tyrosine and/or serine recombinase sequences.

[0192] 38. The system of paragraph 37, wherein the serine recombinase sequences comprise resolvase and/or integrase sequences.

[0193] 39. The system of any one of paragraphs 27-38, further comprising continuously updating the solved recombinase list as the protein database is updated.

### EXAMPLES

### Example 1. Discovery of Large Serine Phage Integrases

[0194] While this example describes a method for identifying large serine phage integrases, it should be understood that the method may be used to identify other site-specific recombinases.

[0195] Step 1: A Conserved Domain superfamily sub-architecture common to all characterized Large Serine Phage Integrases was manually defined by performing an NCBI Conserved Domain (CD) search (http://www.ncbi.nlm nih.gov/Structure/cdd/wrpsb.cgi) on their amino acid sequences with default parameters (E<0.01) and deducing the largest consecutive Conserved Domain superfamily subarchitecture shared by them all. The largest common consecutive Conserved Domain superfamily subarchitecture (N-terminus to C-terminus direction) is: [\hat{ }]˜[c102788(Ser_Recombinase superfamily)]˜[c106512(Recombinase superfamily)], where [\hat{ }] denotes that no other Conserved Domain occurs N-terminal to c102788. The region C-terminal to c106512 is free to contain any number and combination of Conserved Domain superfamilies, or none at all.

[0196] The Accession.version identifiers of putative Large Serine Phage Integrase proteins in the NCBI Entrez non-redundant (nr) Protein Database are manually retrieved for each unique CDART architecture based on the Conserved Domain superfamily sub-architecture defined, using NCBI's CDART (http://www.ncbi.nlm nih.gov/ Structure/lexington/lexington.cgi) with default parameters, and concatenated together.

[0197] Step 2: Records of all nucleotide sequences encoding all putative Large Serine Phage Integrase proteins identified in Step 1 are retrieved as Identical Protein Groups (IPG) Records. For each unique protein sequence, this record details, for every annotated occurrence in the NCBI Entrez Nucleotide database of a coding sequence for the protein, the: unique IPG identifier of the protein sequence, the accession.version of the nucleotide record containing the coding sequence, the source database of this nucleotide record, the start and stop coordinates of the protein coding sequence within the whole nucleotide sequence, the strand encoding the protein (+/−), the accession.version of the protein record linked to this particular coding sequence occurrence, the protein name in the protein record linked to this particular coding sequence occurrence, the organism and strain linked to the nucleotide record containing the coding sequence, and the accession.version of the nucleotide Assembly record linked to the nucleotide record containing the coding sequence. This is achieved with the NCBI Entrez E-utlities command, EFetch, with db as “protein”, id as [a putative Large Serine Phage Integrase protein accession.version] and retype as “ipg”. By retrieving every annotated occurrence of a nucleotide sequence coding for each protein, (1) the chances of finding each putative Large Serine Phage Integrase gene in at least one genetic context that allows its associated att sites to be solved are increased, and (2) it becomes possible to independently solve associated att sites for a single Large Serine Phage Integrase protein found encoded in several genomic contexts, providing “biological replicates” and so information as to the specificity of an integrase for its attB and attP sites, for example.

[0198] Rows in the IPG record tables in which a nucleotide record is absent (Nucleotide Accession=“N/A”), or in which the nucleotide sequence is annotated as deriving from sources unlikely to yield attL/attR sites (e.g., artificial sequences, un-integrated plasmids, un-integrated phages), are removed to avoid wasteful downstream computation. Artificial sequences and un-integrated phages can be identified by string-searching the Organism column of the IPG record tables for the words “synthetic” or “artificial”, and “phage” or “virus”, respectively. Nucelotide sequences derived from plasmids may be identified by retrieving the Document Summary of the remaining Nucleotide records (NCBI Entrez E-utlities command, EFetch, with db as nuccore, id as the Nucleotide record accession.version, and retype as docsum), and string-searching the Document Summary Title field for the word “plasmid”. Note, there are other ways to restrict the IPG record table rows to exclude all nucleotide records coming from undesired/unuseful sources. By using methods that enable automatic removal of uninformative nucleotide sequences, including artificial/synthetic nucleotide sequences, from the search list, which can be common for classes of proteins such as integrases, speed and automation are added to the pipeline.

[0199] After this filtering step, the remaining nucleic acid sequences named in the IPG record tables are uniqued on their accession.version identifiers and scanned to detect the presence and approximate location of any putative prophages. This is achieved within the script by accessing the web-based Phaster program, through their URL API, with built-in pause times and error-handling to avoid crashes due to download failures. The input submitted to Phaster is the nucleotide's accession.version, rather than the nucleotide sequence itself, allowing pre-computed Phaster records associated to certain NCBI Entrez nucleotide accession.versions to be instantly retrieved, and avoiding the need to download the nucleotide sequences pre-prophage-screening. The loop used to submit this set of Entrez accession.version-identified jobs to Phaster may be continuously re-run, or after a suitable time-delay, until all jobs have returned a Phaster report (JSON format) containing a non-null “error” field or a “status” field containing “Complete”. Note, there are many other open-source prophage-detection programs that may be used for this purpose, both web-based and locally executable (in which case FASTA files containing all the unique nucleotide sequences named in the filtered IPG record tables need to be first downloaded to use as the input for the prophage-detection program, using the Entrez E-utlities command, EFetch, with db as “nuccore”, id as [the Nucleotide record accession.version], and retype as “fasta”), such as Prophage Hunter, Prophinder, Phast and PhiSpy.

[0200] Step 3: The set of Phaster (or other prophage-detection software) output files are parsed to extract all instances of predicted intact/active prophages along with their predicted approximate coordinates within the submitted nucleotide sequences. For each prophage, its coordinates are compared with the coordinates of the set of putative Large Serine Phage Integrases encoded within the same nucleotide sequence (as recorded in the IPG record tables). An error margin for the predicted prophage coordinates is permitted (e.g., 20 kilobases (kb) for each boundary), and if a putative Large Serine Phage Integrase coding sequence overlaps this extended putative prophage range, the putative prophage details (including nucleotide Entrez accession.version, prophage unique identifier and predicted prophage coordinates), are kept for the later steps (note there may be several unique predicted prophages within a given nucleotide sequence). The concept of an error-margin in the prediction of prophage coordinates is included, so that putative Large Serine Phage Integrase coding sequences that do not lie within the originally predicted prophage coordinates but may later be discovered to indeed lie within the precisely solved prophage coordinates are not prematurely discounted (many Large Serine Phage Integrase coding sequences may lie close to one end of a prophage, and phage-detection software is known to display large error in prophage boundary prediction).

[0201] The unique set of Entrez nucleotide accession.version identifiers containing this set of predicted prophages lying close to or coinciding with a putative Large Serine Phage Integrase coding sequence is computed and their associated nucleotide sequences are downloaded from NCBI, if not already present from Step 2 if a locally-executed prophage-detection program is used (Entrez E-utlities command, EFetch, with db as “nuccore”, id as [the Nucleotide record accession.version], and retype as “fasta”).

[0202] Independently, the BLAST-formatted NCBI Entrez nucleotide (nt) database is downloaded/updated. Also independently, the unique set of genera from which the nucleotide sequences containing the set of predicted prophages lying close to or coinciding with a putative Large Serine Phage Integrase coding sequence are derived are computed, by taking the first word of the associated Organism values. (All genus words then surrounded by square brackets are re-defined as “unclassified”, following NCBI taxonomy annotation rules). An alternative approach is retrieving the NCBI genus taxonomy id associated to each full Organism name. For each unique resulting genus, the set of accession.version identifiers of all whole-genome-derived sequences in the Entrez Nucleotide database ascribed to this genus are retrieved from NCBI, using the Entrez E-utlities commands, Esearch then Efetch, with db as “nuccore”, term as [(genus[Organism]) AND (complete genome[title] OR chromosome[title])], and retype as “acc”. Also independently, the set of accession.version identifiers of all whole-genome-derived sequences in the Entrez Nucleotide database ascribed to prokaryotes is retrieved from NCBI, using the Entrez E-utlities commands, Esearch then Efetch, with db as “nuccore”, term as [(bacteria[Filter] OR archaea[Filter]) AND (complete genome[title] OR chromosome[title])], and retype as “acc”. Other Entrez search strategies may also be used to the same effect. For each of these genus-specific accession.version lists, and the total prokaryotic accession.version list, an associated BLAST+ alias database of the Entrez nucleotide database (titled to identify the genus it is based on, or the fact that it contains sequences from prokaryotes in general) is then created using the NCBI BLAST+ blastdb_aliastool command.

[0203] When this has been accomplished, all unique predicted prophages are extracted along with a chosen length of flanking DNA sequence, and aligned against the appropriate subset of whole-genome-derived sequences from the NCBI nucleotide database. First, the DNA sequence centered on each predicted prophage, and including a defined length (for example, 20 kb) on each side, is extracted using the prophage coordinates predicted by the prophage-detection software along with the relevant downloaded nucleotide sequences. If the predicted prophage start coordinate is less than this length from the start of the nucleotide sequence, or the predicted prophage stop coordinate is less than this length from the end of the nucleotide sequence, then the left flank will extend only to the start of the nucleotide sequence, and the right flank will extend only to the end of the nucleotide sequence, respectively. Alternatively, circular nucleotide sequences may be identified through an Entrez search, and in these cases, the full-length flanks may be extracted by accounting for this circularity. The coordinates of the putative Large Serine Phage Integrase coding sequences and the predicted prophages within the extracted DNA sequences are recorded for future steps. Extracting long (e.g., at least 20 kb) flanks surrounding predicted prophages for alignment increases the success rate of solving precise prophage boundaries in Step 5, as the large error in prophage boundary prediction by prophage-detection software (exacerbated by prophage sequences sometimes being disrupted by other mobile elements) can result in the ends of the true prophage not being reached when shorter flanks are taken.

[0204] Step 4: Each unique extracted DNA sequence containing a predicted prophage is aligned against the appropriate subset of whole-genome-derived sequences from the NCBI Nucleotide ndatabase using the BLASTn command from the NCBI BLAST+software package. For an optimal balance of speed and sensitivity, the following parameters are used: -task MegaBLAST, -word_size 32, -evalue 0.1, -max_target_seqs 200, with -outfmt 6. The appropriate alias BLAST database to use as the reference set is determined by extracting the genus word associated to each predicted prophage instance, in precisely the same way as was done to compute the unique set of genera above. Predicted prophage-containing sequences ascribed to a genus for which a non-empty alias database was not successfully constructed are instead aligned against the all-prokaryote alias database, using the same parameters as for the genus-specific alignments. Cases in which an appropriate non-empty genus-specific alias database was successfully created but returned no hits in a BLAST search may be re-attempted using the all-prokaryote alias BLAST database as reference set, in case of, for example, taxonomy errors.

[0205] In Steps 3 and 4, a rapid, efficient, and scalable, automated strategy for alignment of predicted prophage-containing DNA sequences against whole-genome-derived reference sequences is provided. A non-redundant NCBI Entrez Nucleotide database may be used in combination with rapid Entrez search/fetch-enabled retrieval of the accession.version identifiers of all whole-genome/chromosomederived sequences for a desired genus (or all prokaryotes) within this nucleotide database and respective alias file creation. This in turn enables fast BLAST execution independent of the NCBI compute resources, during customized BLAST parameters may be utilized. Finally, these steps included a strategy to handle cases where genus-specific alignment searches fail, such as known/unknown taxonomic misclassification or a scarcity of sequenced genomes for a particular genus, by using a broader reference set (all whole-genome-derived prokaryotic sequences in the nucleotide database) for these cases. The more intensive computation necessitated by this larger reference set is made feasible by the methods provided herein.

[0206] Step 5: A custom algorithm is applied to automatically search for cases where predicted prophage-containing sequences have been aligned with partially homologous sequences lacking the prophage, and to use the alignment information to solve the putative att core sequence for the prophage in question. The putative core sequence may be ambiguous due to alignment details, in which case the most likely core sequence is recorded, possibly along with other potential core sequences and with an ambiguity score. Core sequences are used to infer putative attL and attR sites by taking a ˜66 bp region centered on the core sequence at the left and right ends of the prophage, respectively, and putative attB and attP sites are computed based on strand exchange between the cores of attL and attR. att sites are associated with the ambiguity score of their inferred core sequence. Multiple/all reported alignments are considered for each predicted prophage-containing sequence, resulting in the potential for multiple core/attL/attR/attB/attP site sets to be inferred for each putative prophage. As different reference sequences can result in different alignment details, this can result in some putative prophages being associated to both ambiguous and unambiguous sites (in which case unambiguous sites can be prioritized), and allows for assessment of confidence in the inferred att sites (for some putative prophages, different reference sequences may give rise to the same set of inferred att sites, while for others, there may be inconsistencies between sets inferred from different reference sequences). To avoid false positives, putative att sites are only solved for a given alignment if at least one of the putative Large Serine Phage Integrase coding sequences associated to the predicted prophage in question lies within the precise prophage boundaries defined by the left and right core sites.

[0207] Each non-empty alignment output table from Step 4 is read in and processed as follows: all individual alignment ranges shorter than a given length (e.g., 900 bp) can be discarded to reduce computation time; a list of reference sequences producing more than 1 (filtered) alignment range with the predicted prophage-containing sequence in question is computed; for each of these reference sequences, its alignment ranges with the predicted prophage-containing sequence in question are categorized as aligning to the left prophage boundary region, the right prophage boundary region, or neither and so are discarded (a prophage boundary prediction error-margin is again permitted, e.g., 6 kb, such that any alignment range who's right end stops before the predicted prophage start coordinate plus this error margin is categorized as aligning to the left prophage boundary region, and any alignment range who's left end starts after the predicted prophage stop coordinate minus this error margin is categorized as aligning to the right prophage boundary region); for all iso-oriented combinations of left/right prophage boundary region alignment ranges for which at least one of the associated putative Large Serine Phage Integrase coding sequences lies fully between them, an overlap length between them with respect to their reference sequence coordinates is computed; if this yields a single overlap with a length longer than lbp and less than an appropriate upper limit, e.g., 31 bp, then the precise overlapping regions of the predicted prophage-containing sequence are extracted as the “left overlap” and “right overlap”, according to the prophage boundary they come from (if multiple such overlaps are detected, the alignment with this particular reference sequence is deemed complex and is flagged for, e.g., later manual analysis); if the “left overlap” and “right overlap” are identical, their sequence is unambiguously defined as the att core sequence, but if they are not identical (due to one or both alignment ranges extending beyond the core site), the longest exact matching substring(s) between the “left overlap” and “right overlap” is taken as the most likely core sequence(s); an ambiguity score is attributed to core sequences, and the set of att sites based on them, depending on whether “left overlap” and “right overlap” were identical (0), “left overlap” and “right overlap” were non-identical but there was a single longest exact matching substring between them (1), or “left overlap” and “right overlap” were non-identical and there were multiple longest exact matching substrings between them (# longest exact matches); the coordinates of all putative left/right core pairs in the context of the original complete nucleic acid sequence containing the predicted prophage are recorded for later quality control steps (by referring to the coordinates of the region extracted in Step 4); putative attL and attR sites are computed from each putative core sequence, by extracting a ˜66 bp region centered on the core sequence at the left or right prophage boundary, respectively; putative attB and attP sites are reconstructed on the basis of strand exchange between the cores of attL and attR. The coordinates of the attL and attR cores are compared with the coordinates of all putative Large Serine Phage Integrase coding sequences located in the same original Entrez nucleotide record as the predicted prophage-containing sequence in question, and all integrase coding sequences falling within these cores are recorded as potentially acting on the inferred att sites.

[0208] Here, an efficient algorithm for solving att sites automatically is implemented, as well as providing an automatic measure of confidence in each predicted att site set, in the form of ambiguity scores. Related to this, also provided is a strategy to automatically handle cases where the sequences of a “left overlap” and “right overlap” are non-identical.

[0209] For each putative prophage, the method considers multiple/all pairs of “left overlap” and “right overlap” detected from the alignment output to potentially define a list of att core sequences associated to that prophage (along with an ambiguity score for each). This can help improve the best ambiguity score achieved for a given prophage's att sites, as some alignments of the same predicted prophage-containing sequence may provide less ambiguous information than others, as well as provide other information relating to the overall confidence in the inferred att sites of a given prophage (e.g., one may infer different att core sequences for a given prophage, but with each having an ambiguity score of 0, indicating a potential problem in the alignment analysis for this predicted prophage-containing sequence).

[0210] Also included in the method is an explicit, efficient verification that all att site sets solved enclose at least one coding sequence for a putative Large Serine Phage Integrase from the Step 2 list, by only considering for overlap analysis left- and right-prophage boundary alignment range pairs that enclose one.

[0211] Further, a single prophage may contain multiple Large Serine Phage Integrases, any one of which may have been responsible for the recombination reaction between the original phage's attP site and the attB site of the prokaryotic chromosome where it is now detected as having integrated. With no rapid informatic way to deduce which integrase was responsible for the integration reaction, it is advantageous to document that any inferred att sites for this prophage may be the substrate of any of the integrases contained within it. This is achieved automatically and rapidly by using the integrase coding sequence coordinates found in the IPG records tables.

[0212] Step 6: Another, non-homologous class of phage integrases, the Tyrosine Phage Integrases, may occur within a prophage with Large Serine Phage Integrases, and so also demand consideration as the integrase responsible for a given integration reaction. IPG records for putative Tyrosine Phage Integrases may be obtained using similar homology-based methods as those detailed in Steps 1-3 for Large Serine Phage Integrases (Conserved Domain Architecture, but also, e.g., BLAST/PSI-BLAST). The coordinates of all putative attL/attR core pairs are thus compared with coordinates of putative Tyrosine Phage Integrase coding sequences, as in Step 5 for putative Large Serine Phage Integrase coding sequences, and an integrase is again ascribed to an att site set if its coding sequence falls within those core sites. If a Tyrosine Phage Integrase was responsible for the integration, the inferred attB and attP sites are less likely to be valid, due to their different typical lengths between Large Serine and Tyrosine Phage Integrases. It should also be noted that integrase coding sequences may be disrupted upon integration, which raises a small possibility that the integration was catalyzed by an undetected integrase (these cases could be detected with a more thorough informatic search for split integrase coding sequences).

[0213] Continuous Operation: With all steps of the pipeline fully automated, the exponentially growing volume of public sequence data can be leveraged by employing it continuously. New sequence data may be used in three ways:

[0214] (1) Predicted prophage regions previously found to carry putative Large Serine Phage Integrase coding sequences within (or reasonably near) them in Step 4, but with currently unsolved or only ambiguous att sites (“unsolved prophages”) can be aligned against new reference sequences as they are made available. For this, the local NCBI nucleotide database may be automatically updated at a regular time interval (e.g., weekly, monthly) using NCBI's update_blastdb.pl script, and the unique set of genera from which the current set of “unsolved prophages” is derived can be automatically computed as described in Step 4. For each unique resulting genus, the set of accession.version identifiers of all new whole-genome-derived sequences in the Entrez Nucleotide database ascribed to this genus are retrieved from NCBI using the Esearch/Efetch strategy described in Step 4 but with the addition of searching the Publication Date field with a date range from the date of the last local update to the current date. The same can be done for the new total prokaryotic accession.version list, using the other search criteria described in Step 4. An associated set of BLAST+ alias database files can be created from these accession.version lists, which can then be used as the subject sets for BLAST alignment with the current set of “unsolved prophage” sequences, according to the method of Step 4, with the methods of Step 5 and Step 6 following on. The list of current “unsolved prophages” is updated after each such update.

[0215] (2) Putative Large Serine Phage Integrases that have been previously mined but for which no coding sequences have been found to occur within (or close to) a predicted prophage (“unplaced integrases”) can potentially be located in new genetic contexts. New coding sequence instances of these proteins can be continuously mined by retrieving IPG records for them at regular intervals and comparing them with the previous records to extract new row entries. Any new entries can then be automatically passed through the remainder of Steps 3-6. The lists of current “unplaced integrases” and “unsolved prophages” are updated after each such update.

[0216] (3) Finally, records for new putative Large Serine Phage Integrase proteins can be retrieved from the NCBI Entrez Protein database as they are made available and be automatically submitted to the entire pipeline described in Steps 3-6, as they are up until now completely unanalyzed. CDART does not currently enable automatic retrieval of proteins with defined architectures, but new putative Large Serine Phage Integrase proteins may be automatically mined by updating a local copy of the NCBI non-redundant Protein database at a regular time interval (using the update_blastdb.pl script as in (1)), and searching this database for homologs of the current list of putative Large Serine Phage Integrase sequences using e.g., BLAST or PSI-BLAST (alternatively, newly added non-redundant sequences can be automatically downloaded in FASTA format, formatted as a database for a higher-performance aligner, e.g., DIAMOND, and aligned with this instead). The list of current putative Large Serine Phage Integrases is updated after each such update, as are the lists of current “unsolved prophages” and “unplaced integrases”.

[0217] Examples 2-4 below include newly-identified site-specific recombinases and their four (4) cognate recognition sites. These recombinases and recognition sites are grouped according to a shared characteristic or feature. Each group represents a new category of recombinases that has not been previously identified, and thus expands the capability to preform site specific recombination of DNA in vitro, in cells, and in vivo.

### Example 2. New Recombinases Families Grouped by Shared Homology

[0218] Described herein is a database of 395 site-specific recombinase amino acid sequences, each associated with at least four predicted att DNA substrates (L, R, B, P), where 64 of these recombinase target site pairings were previously known, and 331 are newly identified and disclosed herein (Tables 1 and 2). Site-specific recombinases and their associated DNA target pairs for recombinases that differ substantially in amino acid sequence from known recombinases with known DNA target sites were identified by clustering at 30% amino acid protein identity.

[0219] Clustering these sequences at 30% amino acid identity reveals 88 clusters. Within each of the 88 clusters, the member sequences share more than some threshold degree of homology at the amino acid level to the cluster's centroid—that threshold has been set to be 30%. All members to a given cluster are closer in homology space to their assigned cluster centroid than to any other cluster centroid. This means that cluster centroids are more than 70% different relative to each other (FIG. 3).

[0220] Of the 88 identified clusters, 51 clusters are entirely new—meaning that they do not contain any known recombinase genes that have previously described target sites (see FIG. 4). Each new site-specific recombinase cluster represents a new family of recombinases that is only distantly related (in homology space) to known enzymes. Each of these clusters represents therefore a new region of both recombinase and DNA target site sequence space.

[0221] The 110 new site-specific recombinases that together comprise 51 newly identified clusters (with no previously known site-solved members) along with their target sites are provided in Tables 1 and 2 (“New Recombinases” or “New R” indicated). Each centroid (“Cent”) can represent the entire cluster, as all clustered sequences are more than 30% similar to the centroid sequence.

TABLE 1
Recombinases and cognate recognition sites

| Protein Accession | SEQ | | | | | | Predicted Recognition Sites⁺ | | | |
|---|---|---|---|---|---|---|---|---|---|---|
| Number | ID NO: | Organism | C | New C | Cent | New R | L | R | B | P |
| | | | | | | | SEQ ID NO: | | | |
| AAD26564.1 | 1 | Enterococcus phage | 65 | No | No | No | | | | |
| | | phiFC1 | | | | | | | | |
| AAG59740.1 | 2 | Mycobacterium virus | 12 | No | No | No | | | | |
| | | Bxb1 | | | | | | | | |
| ABC40426.1 | 3 | Bacillus virus Wbeta | 49 | No | No | No | | | | |
| ADF59162.1 | 4 | Bacillus phage phi105 | 59 | No | No | No | | | | |
| AFV51369.1 | 5 | Streptomyces phage | 67 | No | Yes | No | | | | |
| | | phiCAM | | | | | | | | |
| AJG57936.1 | 6 | Bacillus cereus D17 | 49 | No | No | Yes | 396 | 727 | 1058 | 1389 |
| AKY03507.1 | 7 | Streptomyces phage | 19 | No | Yes | No | | | | |
| | | Danzina | | | | | | | | |
| AKY03881.1 | 8 | Streptomyces phage | 66 | No | Yes | No | | | | |
| | | Verse | | | | | | | | |
| AND10894.1 | 9 | Bacillus thuringiensis | 49 | No | No | Yes | 397 | 728 | 1059 | 1390 |
| | | serovar alesti | | | | | | | | |
| APC43293.1 | 10 | Streptomyces phage Joe | 19 | No | No | No | | | | |
| ASN71670.1 | 11 | Staphylococcus | 73 | No | No | Yes | 398 | 729 | 1090 | 1391 |
| | | epidermidis | | | | | | | | |
| BAA07372.1 | 12 | Streptomyces phage R4 | 67 | No | No | No | | | | |
| BAE05705.1 | 13 | Staphylococcus | 73 | No | No | No | | | | |
| | | haemolyticus | | | | | | | | |
| | | JCSC1435 | | | | | | | | |
| BAF03598.1 | 14 | Streptomyces phage | 13 | No | No | No | | | | |
| | | phiK38-l | | | | | | | | |
| BAF67264.1 | 15 | Staphylococcus aureus | 73 | No | No | No | | | | |
| | | subsp. aureus str. | | | | | | | | |
| | | Newman | | | | | | | | |
| BAG46462.1 | 16 | Burkholderia | 5 | No | No | No | | | | |
| | | multivorans ATCC | | | | | | | | |
| | | 17616 | | | | | | | | |
| CAD00410.1 | 17 | Bacteriophage A118] | 78 | No | No | No | | | | |
| | | [Listeria | | | | | | | | |
| | | monocytogenes EGD-e | | | | | | | | |
| CAR95427.1 | 18 | Streptococcus phage | 27 | No | No | No | | | | |
| | | phi-m46.1 | | | | | | | | |
| CBG73463.1 | 19 | Streptomyces scabiei | 41 | No | Yes | No | | | | |
| | | 87.22 | | | | | | | | |
| CYZ86932.1 | 20 | Streptococcus suis | 58 | Yes | No | Yes | 399 | 730 | 1061 | 1392 |
| EFD80439.2 | 21 | Fusobacterium | 82 | Yes | No | Yes | 400 | 731 | 1062 | 1393 |
| | | nucleatum subsp. | | | | | | | | |
| | | animalis D11 | | | | | | | | |
| EFR90504.1 | 22 | Listeria monocytogenes | 31 | Yes | No | Yes | 401 | 732 | 1063 | 1394 |
| EOE27531.1 | 23 | Enterococcus faecalis | 9 | Yes | No | Yes | 402 | 733 | 1064 | 1395 |
| | | EnGen0285 | | | | | | | | |
| EOK04340.1 | 24 | Enterococcus faecalis | 65 | No | No | Yes | 403 | 734 | 1065 | 1396 |
| | | EnGen0367 | | | | | | | | |
| EOP86000.1 | 25 | Bacillus cereus HuB4-4 | 53 | No | No | Yes | 404 | 735 | 1066 | 1397 |
| EQE33494.1 | 26 | Clostridioides difficile | 74 | No | Yes | Yes | 405 | 736 | 1067 | 1398 |
| ETI84184.1 | 27 | Streptococcus | 27 | No | No | Yes | 406 | 737 | 1068 | 1399 |
| | | anginosus DORA_7 | | | | | | | | |
| GDD80774.1 | 28 | Escherichia coli | 30 | Yes | Yes | Yes | 407 | 738 | 1069 | 1400 |
| KDF51021.1 | 29 | Enterobacter | 4 | Yes | Yes | Yes | 408 | 739 | 1070 | 1401 |
| | | roggenkampii CHS 79 | | | | | | | | |
| KEK15983.2 | 30 | Lactobacillus reuteri | 57 | No | No | Yes | 409 | 740 | 1071 | 1402 |
| KIS18008.1 | 31 | Streptococcus equi | 57 | No | No | Yes | 410 | 741 | 1072 | 1403 |
| | | subsp. zooepidemicus | | | | | | | | |
| | | Sz4is | | | | | | | | |
| KIS38487.1 | 32 | Stenotrophomonas | 5 | No | No | Yes | 411 | 742 | 1073 | 1404 |
| | | maltophilia WJ66 | | | | | | | | |
| KXO02427.1 | 33 | Bacillus thuringiensis | 49 | No | No | Yes | 412 | 743 | 1074 | 1405 |
| NP_047974.1 | 34 | Streptomyces virus | 2 | No | No | No | | | | |
| | | phiC31 | | | | | | | | |
| NP_112664.1 | 35 | Lactococcus phage | 54 | No | Yes | No | | | | |
| | | TP901-1 | | | | | | | | |
| NP_268897.1 | 36 | Streptococcus phage | 54 | No | No | No | | | | |
| | | 370.1 | | | | | | | | |
| NP_268897.1 | 37 | Streptococcus pyogenes | 54 | No | No | Yes | 413 | 744 | 1075 | 1406 |
| | | M1 GAS | | | | | | | | |
| NP_415076.1 | 38 | Escherichia coli str. K- | 42 | Yes | No | Yes | 414 | 745 | 1076 | 1407 |
| | | 12 substr. MG1655 | | | | | | | | |
| NP_463492.1 | 39 | Listeria monocytogenes | 78 | No | No | Yes | 415 | 746 | 1077 | 1408 |
| NP_470568.1 | 40 | Listeria innocua | 53 | No | No | No | | | | |
| | | Clip11262 | | | | | | | | |
| NP_813744.2 | 41 | Streptomyces virus | 7 | No | Yes | No | | | | |
| | | phiBT1 | | | | | | | | |
| NP_817623.1 | 42 | Mycobacterium virus | 32 | No | Yes | No | | | | |
| | | Bxz2 | | | | | | | | |
| NP_831691.1 | 43 | Bacillus cereus ATCC | 49 | No | No | Yes | 416 | 747 | 1078 | 1409 |
| | | 14579 | | | | | | | | |
| QBI96918.1 | 44 | Mycobacterium phage | 45 | No | No | No | | | | |
| | | Veracruz | | | | | | | | |
| SCC33377.1 | 45 | Bacillus cereus | 49 | No | No | Yes | 417 | 748 | 1079 | 1410 |
| SHX05262.1 | 46 | Mycobacteroides | 77 | Yes | Yes | Yes | 418 | 749 | 1080 | 1411 |
| | | abscessus subsp. | | | | | | | | |
| | | abscessus | | | | | | | | |
| SQB82501.1 | 47 | Streptococcus | 54 | No | No | Yes | 419 | 750 | 1081 | 1412 |
| | | dysgalactiae | | | | | | | | |
| SQI07626.1 | 48 | Streptococcus | 57 | No | Yes | Yes | 420 | 751 | 1082 | 1413 |
| | | pasteurianus | | | | | | | | |
| TBW91720.1 | 49 | Staphylococcus hominis | 73 | No | No | Yes | 421 | 752 | 1083 | 1414 |
| WP_000215775.1 | 50 | Bacillus cereus VD115 | 56 | No | No | Yes | 422 | 753 | 1084 | 1415 |
| WP_000286204.1 | 51 | Bacillus cereus MSX- | 35 | No | Yes | Yes | 423 | 754 | 1085 | 1416 |
| | | D12 | | | | | | | | |
| WP_000633501.1 | 52 | Streptococcus | 57 | No | No | Yes | 424 | 755 | 1086 | 1417 |
| | | agalactiae FSL S3-105 | | | | | | | | |
| WP_000633509.1 | 53 | Streptococcus | 57 | No | No | Yes | 425 | 756 | 1087 | 1418 |
| | | pneumoniae 670-6B | | | | | | | | |
| WP_000650392.1 | 54 | Bacillus thuringiensis | 70 | Yes | Yes | Yes | 426 | 757 | 1088 | 1419 |
| | | serovar kurstaki str. | | | | | | | | |
| | | YBT-1520 | | | | | | | | |
| WP_000709069.1 | 55 | Escherichia coli 5.0588 | 42 | Yes | No | Yes | 427 | 758 | 1089 | 1420 |
| WP_000709099.1 | 56 | Escherichia coli 55989 | 42 | Yes | No | Yes | 428 | 759 | 1090 | 1421 |
| WP_000844785.1 | 57 | Bacillus thuringiensis | 8 | No | No | Yes | 429 | 760 | 1091 | 1422 |
| | | serovar chinensis CT-43 | | | | | | | | |
| WP_000844788.1 | 58 | Bacillus thuringiensis | 8 | No | No | Yes | 430 | 761 | 1092 | 1423 |
| | | HD-789 | | | | | | | | |
| WP_000861306.1 | 59 | Staphylococcus aureus | 71 | No | No | Yes | 431 | 762 | 1093 | 1424 |
| | | subsp. aureus 132 | | | | | | | | |
| WP_000872533.1 | 60 | Bacillus sp. 2D03 | 49 | No | No | Yes | 432 | 763 | 1094 | 1425 |
| WP_000872535.1 | 61 | Bacillus cereus | 49 | No | No | Yes | 433 | 764 | 1095 | 1426 |
| | | BAG3X2-2 | | | | | | | | |
| WP_000989160.1 | 62 | Streptococcus | 57 | No | No | Yes | 434 | 765 | 1096 | 1427 |
| | | agalactiae FSL S3-277 | | | | | | | | |
| WP_001044789.1 | 63 | Streptococcus | 54 | No | No | Yes | 435 | 766 | 1097 | 1428 |
| | | agalactiae CCUG | | | | | | | | |
| | | 39096 A | | | | | | | | |
| WP_001233549.1 | 64 | Shigella boydii | 5 | No | No | Yes | 436 | 767 | 1098 | 1429 |
| WP_002165157.1 | 65 | Bacillus cereus VD048 | 8 | No | No | Yes | 437 | 768 | 1099 | 1430 |
| WP_002349497.1 | 66 | Enterococcus faecium | 9 | Yes | No | Yes | 438 | 769 | 1100 | 1431 |
| | | R501 | | | | | | | | |
| WP_002359484.1 | 67 | Enterococcus faecalis | 65 | No | No | Yes | 439 | 770 | 1101 | 1432 |
| WP_002381434.1 | 68 | Enterococcus faecalis | 65 | No | No | Yes | 440 | 771 | 1102 | 1433 |
| WP_002399935.1 | 69 | Enterococcus faecalis | 65 | No | No | Yes | 441 | 772 | 1103 | 1434 |
| | | TX0309B | | | | | | | | |
| WP_002409538.1 | 70 | Enterococcus faecalis | 65 | No | No | Yes | 442 | 773 | 1104 | 1435 |
| | | TX0645 | | | | | | | | |
| WP_002416055.1 | 71 | Enterococcus faecalis | 65 | No | No | Yes | 443 | 774 | 1105 | 1436 |
| | | ERV103 | | | | | | | | |
| WP_002469492.1 | 72 | Staphylococcus | 73 | No | No | Yes | 444 | 775 | 1106 | 1437 |
| | | epidermidis | | | | | | | | |
| WP_002475509.1 | 73 | Staphylococcus | 73 | No | No | Yes | 445 | 776 | 1107 | 1438 |
| | | epidermidis 14.1.R1.SE | | | | | | | | |
| WP_002502891.1 | 74 | Staphylococcus | 73 | No | No | Yes | 446 | 777 | 1108 | 1439 |
| | | epidermidis NIHLM003 | | | | | | | | |
| WP_003199542.1 | 75 | Bacillus | 8 | No | No | Yes | 447 | 778 | 1109 | 1440 |
| | | pseudomycoides | | | | | | | | |
| WP_003365993.1 | 76 | Clostridium botulinum | 40 | Yes | Yes | Yes | 448 | 779 | 1110 | 1441 |
| | | C str. Eklund | | | | | | | | |
| WP_003514343.1 | 77 | Hungateiclostridium | 82 | Yes | Yes | Yes ^{T} | 449 | 780 | 1111 | 1442 |
| | | thermocellum JW20 | | | | | | | | |
| WP_003727736.1 | 78 | Listeria monocytogenes | 78 | No | No | Yes | 450 | 781 | 1112 | 1443 |
| | | J0161 | | | | | | | | |
| WP_003731148.1 | 79 | Listeria monocytogenes | 31 | Yes | No | Yes | 451 | 782 | 1113 | 1444 |
| | | FSL N1-017 | | | | | | | | |
| WP_003731150.1 | 80 | Listeria monocytogenes | 27 | No | No | Yes | 452 | 783 | 1114 | 1445 |
| WP_003770016.1 | 81 | Listeria innocua | 78 | No | No | Yes | 453 | 784 | 1115 | 1446 |
| WP_003903979.1 | 82 | Mycobacterium | 69 | No | Yes | No | | | | |
| | | tuberculosis | | | | | | | | |
| WP_005908927.1 | 83 | Fusobacterium | 63 | Yes | No | Yes | 454 | 785 | 1116 | 1447 |
| | | nucleatum subsp. | | | | | | | | |
| | | animalis F0419 | | | | | | | | |
| WP_008698549.1 | 84 | Fusobacterium | 61 | Yes | Yes | Yes | 455 | 786 | 1117 | 1448 |
| | | ulcerans 12-1B | | | | | | | | |
| WP_008700773.1 | 85 | Fusobacterium | 63 | Yes | Yes | Yes | 456 | 787 | 1118 | 1449 |
| | | nucleatum subsp. | | | | | | | | |
| | | polymorphum F0401 | | | | | | | | |
| WP_009269238.1 | 86 | Enterococcus faecium | 9 | Yes | No | Yes | 457 | 788 | 1119 | 1450 |
| WP_009269239.1 | 87 | Enterococcus faecium | 9 | Yes | Yes | Yes | 458 | 789 | 1120 | 1451 |
| WP_009329281.1 | 88 | Bacillus licheniformis | 59 | No | No | Yes | 459 | 790 | 1121 | 1452 |
| WP_010082246.1 | 89 | Wolbachia | 52 | Yes | Yes | Yes | 460 | 791 | 1122 | 1453 |
| | | endosymbiont of | | | | | | | | |
| | | Drosophila simulans wAu | | | | | | | | |
| WP_010708035.1 | 90 | Enterococcus faecalis | 65 | No | No | Yes | 461 | 792 | 1123 | 1454 |
| | | EnGen0061 | | | | | | | | |
| WP_010717149.1 | 91 | Enterococcus faecalis | 65 | No | Yes | Yes | 462 | 793 | 1124 | 1455 |
| | | EnGen0115 | | | | | | | | |
| WP_010725837.1 | 92 | Enterococcus faecium | 80 | Yes | Yes | Yes | 463 | 794 | 1125 | 1456 |
| | | EnGen0163 | | | | | | | | |
| WP_010826647.1 | 93 | Enterococcus faecalis | 65 | No | No | Yes | 464 | 795 | 1126 | 1457 |
| | | EnGen0359 | | | | | | | | |
| WP_010990844.1 | 94 | Listeria innocua | 53 | No | No | Yes | 465 | 796 | 1127 | 1458 |
| | | Clip11262 | | | | | | | | |
| WP_010991183.1 | 95 | Listeria innocua | 78 | No | No | Yes | 466 | 797 | 1128 | 1459 |
| | | Clip11262 | | | | | | | | |
| WP_011017563.1 | 96 | Streptococcus pyogenes | 54 | No | No | Yes | 467 | 798 | 1129 | 1460 |
| | | MGAS10270 | | | | | | | | |
| WP_011276651.1 | 97 | Staphylococcus | 73 | No | No | Yes | 468 | 799 | 1130 | 1461 |
| | | haemolyticus | | | | | | | | |
| | | JCSC1435 | | | | | | | | |
| WP_012991015.1 | 98 | Staphylococcus | 73 | No | No | Yes | 469 | 800 | 1131 | 1462 |
| | | lugdunensis HKU09-01 | | | | | | | | |
| WP_013237059.1 | 99 | Clostridium ljungdahlii | 27 | No | Yes | Yes | 470 | 801 | 1132 | 1463 |
| | | DSM 13528 | | | | | | | | |
| WP_013524454.1 | 100 | Geobacillus sp. | 56 | No | No | Yes | 471 | 802 | 1133 | 1464 |
| | | Y412MC61 | | | | | | | | |
| WP_014387031.1 | 101 | Enterococcus faecium | 27 | No | No | Yes | 472 | 803 | 1134 | 1465 |
| | | Aus0004 | | | | | | | | |
| WP_014636355.1 | 102 | Streptococcus suis | 84 | Yes | No | Yes | 473 | 804 | 1135 | 1466 |
| WP_014929968.1 | 103 | Listeria monocytogenes | 27 | No | No | Yes | 474 | 805 | 1136 | 1467 |
| | | FSL N1-017 | | | | | | | | |
| WP_014930216.1 | 104 | Listeria monocytogenes | 78 | No | No | No | | | | |
| WP_015407429.1 | 105 | Dehalococcoides | 51 | Yes | Yes | Yes | 475 | 806 | 1137 | 1468 |
| | | mccartyi BTF08 | | | | | | | | |
| WP_015407430.1 | 106 | Dehalococcoides | 9 | Yes | No | Yes | 476 | 807 | 1138 | 1469 |
| | | mccartyi BTF08 | | | | | | | | |
| WP_015407431.1 | 107 | Dehalococcoides | 83 | Yes | Yes | Yes | 477 | 808 | 1139 | 1470 |
| | | mccartyi BTF08 | | | | | | | | |
| WP_015611741.1 | 108 | Streptomyces | 17 | No | No | Yes | 478 | 809 | 1140 | 1471 |
| | | fulvissimus DSM 40593 | | | | | | | | |
| WP_015891191.1 | 109 | Brevibacillus brevis | 57 | No | No | Yes | 479 | 810 | 1141 | 1472 |
| | | NBRC 100599 | | | | | | | | |
| WP_015957900.1 | 110 | Clostridium botulinum | 8 | No | No | Yes | 480 | 811 | 1142 | 1473 |
| | | B1 str. Okra | | | | | | | | |
| WP_016097900.1 | 111 | Bacillus cereus HuB4-4 | 70 | Yes | No | Yes | 481 | 812 | 1143 | 1474 |
| WP_016130176.1 | 112 | Bacillus cereus | 8 | No | No | Yes | 482 | 813 | 1144 | 1475 |
| | | VDM053 | | | | | | | | |
| WP_016570474.1 | 113 | Streptomyces albulus | 29 | Yes | Yes | Yes | 483 | 814 | 1145 | 1476 |
| | | ZPM | | | | | | | | |
| WP_017696931.1 | 114 | Bacillus subtilis S1-4 | 36 | No | No | Yes | 484 | 815 | 1146 | 1477 |
| WP_019725860.1 | 115 | Pseudomonas | 5 | No | No | Yes | 485 | 816 | 1147 | 1478 |
| | | aeruginosa 213BR | | | | | | | | |
| WP_021374870.1 | 116 | Clostridioides difficile | 8 | No | No | Yes | 486 | 817 | 1148 | 1479 |
| WP_021534391.1 | 117 | Escherichia coli HVH | 30 | Yes | No | Yes | 487 | 818 | 1149 | 1480 |
| | | 147 (4-5893887) | | | | | | | | |
| WP_021775307.1 | 118 | Streptococcus pyogenes | 54 | No | No | Yes | 488 | 819 | 1150 | 1481 |
| | | GA41046 | | | | | | | | |
| WP_023107160.1 | 119 | Pseudomonas | 5 | No | No | Yes | 489 | 820 | 1151 | 1482 |
| | | aeruginosa BL04 | | | | | | | | |
| WP_023115516.1 | 120 | Pseudomonas | 5 | No | No | Yes | 490 | 821 | 1152 | 1483 |
| | | aeruginosa | | | | | | | | |
| | | BWHPSA021 | | | | | | | | |
| WP_023552493.1 | 121 | Listeria monocytogenes | 78 | No | No | Yes | 491 | 822 | 1153 | 1484 |
| WP_024052970.1 | 122 | Streptococcus sp. | 84 | Yes | Yes | Yes | 492 | 823 | 1154 | 1485 |
| | | HMSC034E12 | | | | | | | | |
| WP_024233971.1 | 123 | Escherichia coli STEC | 14 | Yes | Yes | Yes | 493 | 824 | 1155 | 1486 |
| | | O174:H46 str. 1-151 | | | | | | | | |
| WP_024399342.1 | 124 | Streptococcus suis 89- | 84 | Yes | No | Yes | 494 | 825 | 1156 | 1487 |
| | | 5259 | | | | | | | | |
| WP_025191276.1 | 125 | Enterococcus faecalis | 65 | No | No | Yes | 495 | 826 | 1157 | 1488 |
| | | EnGen0367 | | | | | | | | |
| WP_025782674.1 | 126 | Clostridioides difficile | 74 | No | No | Yes | 496 | 827 | 1158 | 1489 |
| | | CD211 | | | | | | | | |
| WP_028992649.1 | 127 | Thermoanaerobacter | 31 | Yes | Yes | Yes ^{T} | 497 | 828 | 1159 | 1490 |
| | | thermocopriae JCM | | | | | | | | |
| | | 7501 | | | | | | | | |
| WP_029159931.1 | 128 | Clostridium | 18 | Yes | Yes | Yes | 498 | 829 | 1160 | 1491 |
| | | scatologenes | | | | | | | | |
| WP_031642347.1 | 129 | Listeria monocytogenes | 78 | No | No | Yes | 499 | 830 | 1161 | 1492 |
| WP_031645248.1 | 130 | Listeria monocytogenes | 78 | No | No | Yes | 500 | 831 | 1162 | 1493 |
| WP_031645680.1 | 131 | Listeria monocytogenes | 78 | No | No | Yes | 501 | 832 | 1163 | 1494 |
| WP_031673611.1 | 132 | Pseudomonas | 5 | No | No | Yes | 502 | 833 | 1164 | 1495 |
| | | aeruginosa | | | | | | | | |
| WP_031788255.1 | 133 | Staphylococcus aureus | 71 | No | No | Yes | 503 | 834 | 1165 | 1496 |
| WP_031890776.1 | 134 | Staphylococcus aureus | 71 | No | No | Yes | 504 | 835 | 1166 | 1497 |
| WP_033654380.1 | 135 | Enterococcus faecium | 27 | No | No | Yes | 505 | 836 | 1167 | 1498 |
| | | R501 | | | | | | | | |
| WP_033943750.1 | 136 | Pseudomonas | 5 | No | No | Yes | 506 | 837 | 1168 | 1499 |
| | | aeruginosa | | | | | | | | |
| WP_035338239.1 | 137 | Bacillus | 59 | No | No | Yes | 507 | 838 | 1169 | 1500 |
| | | paralicheniformis | | | | | | | | |
| WP_035437377.1 | 138 | Lactobacillus | 15 | Yes | Yes | Yes | 508 | 839 | 1170 | 1501 |
| | | fermentum | | | | | | | | |
| WP_035437379.1 | 139 | Lactobacillus | 9 | Yes | No | Yes | 509 | 840 | 1171 | 1502 |
| | | fermentum | | | | | | | | |
| WP_037835118.1 | 140 | Streptomyces sp. NRRL | 25 | Yes | Yes | Yes | 510 | 841 | 1172 | 1503 |
| | | S-455 | | | | | | | | |
| WP_038521242.1 | 141 | Streptomyces albulus | 29 | Yes | No | Yes | 511 | 842 | 1173 | 1504 |
| WP_039388693.1 | 142 | Listeria monocytogenes | 78 | No | No | Yes | 512 | 843 | 1174 | 1505 |
| WP_039660878.1 | 143 | Pantoea sp. MBLJ3 | 46 | Yes | Yes | Yes | 513 | 844 | 1175 | 1506 |
| WP_042515162.1 | 144 | Bacillus cereus | 49 | No | No | Yes | 514 | 845 | 1176 | 1507 |
| WP_043503403.1 | 145 | Pseudomonas | 5 | No | No | Yes | 515 | 846 | 1177 | 1508 |
| | | aeruginosa | | | | | | | | |
| WP_044751504.1 | 146 | Xanthomonas oryzae | 5 | No | Yes | Yes | 516 | 847 | 1178 | 1509 |
| | | pv. oryzicola | | | | | | | | |
| WP_044791785.1 | 147 | Bacillus thuringiensis | 76 | Yes | Yes | Yes | 517 | 848 | 1179 | 1510 |
| WP_044981554.1 | 148 | Streptococcus suis | 58 | Yes | Yes | Yes | 518 | 849 | 1180 | 1511 |
| WP_045667426.1 | 149 | Geobacter | 75 | Yes | No | Yes | 519 | 850 | 1181 | 1512 |
| | | sulfurreducens | | | | | | | | |
| WP_046058042.1 | 150 | Clostridioides difficile | 31 | Yes | No | Yes | 520 | 851 | 1182 | 1513 |
| WP_046377505.1 | 151 | Listeria monocytogenes | 78 | No | No | Yes | 521 | 852 | 1183 | 1514 |
| WP_046559965.1 | 152 | Bacillus velezensis | 59 | No | No | Yes | 522 | 853 | 1184 | 1515 |
| WP_046655502.1 | 153 | Clostridium tetani | 8 | No | No | Yes | 523 | 854 | 1185 | 1516 |
| WP_046811198.1 | 154 | Listeria monocytogenes | 64 | Yes | Yes | Yes | 524 | 855 | 1186 | 1517 |
| WP_048020573.1 | 155 | Bacillus aryabhattai | 53 | No | No | Yes | 525 | 856 | 1187 | 1518 |
| WP_048962262.1 | 156 | Enterococcus faecalis | 65 | No | No | Yes | 526 | 857 | 1188 | 1519 |
| WP_049368564.1 | 157 | Staphylococcus | 73 | No | No | Yes | 527 | 858 | 1189 | 1520 |
| | | epidermidis | | | | | | | | |
| WP_049381135.1 | 158 | Staphylococcus | 71 | No | No | Yes | 528 | 859 | 1190 | 1521 |
| | | epidermidis | | | | | | | | |
| WP_049401331.1 | 159 | Staphylococcus | 73 | No | No | Yes | 529 | 860 | 1191 | 1522 |
| | | epidermidis | | | | | | | | |
| WP_049431410.1 | 160 | Staphylococcus hominis | 73 | No | No | Yes | 530 | 861 | 1192 | 1523 |
| WP_049492617.1 | 161 | Streptococcus | 57 | No | No | Yes | 531 | 862 | 1193 | 1524 |
| | | pseudopneumoniae | | | | | | | | |
| WP_049891860.1 | 162 | Listeria monocytogenes | 78 | No | No | Yes | 532 | 863 | 1194 | 1525 |
| WP_050330935.1 | 163 | Staphylococcus | 71 | No | No | Yes | 533 | 864 | 1195 | 1526 |
| | | schleiferi | | | | | | | | |
| WP_050337544.1 | 164 | Staphylococcus | 71 | No | No | Yes | 534 | 865 | 1196 | 1527 |
| | | schleiferi | | | | | | | | |
| WP_051428004.1 | 165 | Paenibacillus larvae | 86 | Yes | Yes | Yes | 535 | 866 | 1197 | 1528 |
| | | subsp. larvae DSM | | | | | | | | |
| | | 25719 | | | | | | | | |
| WP_051626736.1 | 166 | Caballeronia | 6 | Yes | Yes | Yes | 536 | 867 | 1198 | 1529 |
| | | jiangsuensis | | | | | | | | |
| WP_052263176.1 | 167 | Clostridium | 40 | Yes | No | Yes | 537 | 868 | 1199 | 1530 |
| | | tyrobutyricum | | | | | | | | |
| WP_052497231.1 | 168 | Bacillus thuringiensis | 62 | No | No | Yes | 538 | 869 | 1200 | 1531 |
| | | serovar morrisoni | | | | | | | | |
| WP_052506912.1 | 169 | Streptococcus suis | 88 | Yes | Yes | Yes | 539 | 870 | 1201 | 1532 |
| WP_053020692.1 | 170 | Staphylococcus | 72 | Yes | No | Yes | 540 | 871 | 1202 | 1533 |
| | | haemolyticus | | | | | | | | |
| WP_053028958.1 | 171 | Staphylococcus | 73 | No | Yes | Yes | 541 | 872 | 1203 | 1534 |
| | | haemolyticus | | | | | | | | |
| WP_053290296.1 | 172 | Clostridium botulinum | 40 | Yes | No | Yes | 542 | 873 | 1204 | 1535 |
| WP_053497239.1 | 173 | Stenotrophomonas | 5 | No | No | Yes | 543 | 874 | 1205 | 1536 |
| | | maltophilia | | | | | | | | |
| WP_053512967.1 | 174 | Bacillus thuringiensis | 76 | Yes | No | Yes | 544 | 875 | 1206 | 1537 |
| | | serovar andalousiensis | | | | | | | | |
| WP_053903616.1 | 175 | Escherichia coli | 20 | Yes | Yes | Yes | 545 | 876 | 1207 | 1538 |
| WP_057383473.1 | 176 | Pseudomonas | 5 | No | No | Yes | 546 | 877 | 1208 | 1539 |
| | | aeruginosa | | | | | | | | |
| WP_057385580.1 | 177 | Pseudomonas | 5 | No | No | Yes | 547 | 878 | 1209 | 1540 |
| | | aeruginosa | | | | | | | | |
| WP_058016331.1 | 178 | Pseudomonas | 5 | No | No | Yes | 548 | 879 | 1210 | 1541 |
| | | aeruginosa | | | | | | | | |
| WP_058085641.1 | 179 | Clostridioides difficile | 27 | No | No | Yes | 549 | 880 | 1211 | 1542 |
| WP_058831750.1 | 180 | Listeria monocytogenes | 53 | No | No | Yes | 550 | 881 | 1212 | 1543 |
| WP_059456121.1 | 181 | Burkholderia | 5 | No | No | Yes | 551 | 882 | 1213 | 1544 |
| | | vietnamiensis | | | | | | | | |
| WP_059460907.1 | 182 | Burkholderia | 5 | No | No | Yes | 552 | 883 | 1214 | 1545 |
| | | vietnamiensis | | | | | | | | |
| WP_060670310.1 | 183 | Clostridium perfringens | 44 | Yes | Yes | Yes | 553 | 884 | 1215 | 1546 |
| WP_060798679.1 | 184 | Fusobacterium | 63 | Yes | No | Yes | 554 | 885 | 1216 | 1547 |
| | | nucleatum | | | | | | | | |
| WP_060868949.1 | 185 | Listeria monocytogenes | 31 | Yes | No | Yes | 555 | 886 | 1217 | 1548 |
| WP_061114351.1 | 186 | Listeria monocytogenes | 31 | Yes | No | Yes | 556 | 887 | 1218 | 1549 |
| WP_061322114.1 | 187 | Clostridium botulinum | 31 | Yes | No | Yes | 557 | 888 | 1219 | 1550 |
| WP_061355600.1 | 188 | Escherichia coli | 30 | Yes | No | Yes | 558 | 889 | 1220 | 1551 |
| WP_061660420.1 | 189 | Bacillus cereus | 68 | Yes | No | Yes | 559 | 890 | 1221 | 1552 |
| WP_061664507.1 | 190 | Listeria monocytogenes | 78 | No | No | Yes | 560 | 891 | 1222 | 1553 |
| WP_062078525.1 | 191 | Staphylococcus sp. | 73 | No | No | Yes | 561 | 892 | 1223 | 1554 |
| | | HMSC062D12 | | | | | | | | |
| WP_062723120.1 | 192 | Streptomyces | 17 | No | Yes | Yes | 562 | 893 | 1224 | 1555 |
| | | caeruleatus | | | | | | | | |
| WP_063280150.1 | 193 | Staphylococcus | 73 | No | No | Yes | 563 | 894 | 1225 | 1556 |
| | | epidermidis | | | | | | | | |
| WP_063855923.1 | 194 | Enterococcus faecalis | 79 | Yes | No | Yes | 564 | 895 | 1226 | 1557 |
| WP_064034122.1 | 195 | Listeria monocytogenes | 31 | Yes | No | Yes | 565 | 896 | 1227 | 1558 |
| WP_064206928.1 | 196 | Staphylococcus hominis | 73 | No | No | Yes | 566 | 897 | 1228 | 1559 |
| WP_064297673.1 | 197 | Ralstonia | 5 | No | No | Yes | 567 | 898 | 1229 | 1560 |
| | | solanacearum | | | | | | | | |
| WP_064470310.1 | 198 | Bacillus wiedmannii | 8 | No | No | Yes | 568 | 899 | 1230 | 1561 |
| WP_064549840.1 | 199 | Parageobacillus | 56 | No | Yes | Yes ^{T} | 569 | 900 | 1231 | 1562 |
| | | thermoglucosidasius | | | | | | | | |
| WP_064963684.1 | 200 | Paenibacillus polymyxa | 43 | Yes | Yes | Yes | 570 | 901 | 1232 | 1563 |
| WP_065354608.1 | 201 | Staphylococcus | 73 | No | No | Yes | 571 | 902 | 1233 | 1564 |
| | | pseudintermedius | | | | | | | | |
| WP_065724346.1 | 202 | Stenotrophomonas | 5 | No | No | Yes | 572 | 903 | 1234 | 1565 |
| | | maltophilia | | | | | | | | |
| WP_065733410.1 | 203 | Streptococcus | 54 | No | No | Yes | 573 | 904 | 1235 | 1566 |
| | | agalactiae | | | | | | | | |
| WP_066028610.1 | 204 | Streptococcus | 54 | No | No | Yes | 574 | 905 | 1236 | 1567 |
| | | dysgalactiae subsp. | | | | | | | | |
| | | equisimilis | | | | | | | | |
| WP_066864475.1 | 205 | Sphingobium sp. TCM1 | 26 | Yes | Yes | Yes | 575 | 906 | 1237 | 1568 |
| WP_069002610.1 | 206 | Listeria monocytogenes | 78 | No | No | Yes | 576 | 907 | 1238 | 1569 |
| WP_069019758.1 | 207 | Listeria monocytogenes | 64 | Yes | No | Yes | 577 | 908 | 1239 | 1570 |
| WP_069482207.1 | 208 | Lysinibacillus | 59 | No | Yes | Yes | 578 | 909 | 1240 | 1571 |
| | | fusiformis | | | | | | | | |
| WP_069500683.1 | 209 | Bacillus licheniformis | 59 | No | No | Yes | 579 | 910 | 1241 | 1572 |
| WP_070021558.1 | 210 | Staphylococcus aureus | 73 | No | No | Yes | 580 | 911 | 1242 | 1573 |
| WP_070030387.1 | 211 | Listeria monocytogenes | 78 | No | No | Yes | 581 | 912 | 1243 | 1574 |
| WP_070080197.1 | 212 | Escherichia coli | 42 | Yes | Yes | Yes | 582 | 913 | 1244 | 1575 |
| | | O157:H7 | | | | | | | | |
| WP_070210520.1 | 213 | Listeria monocytogenes | 31 | Yes | No | Yes | 583 | 914 | 1245 | 1576 |
| WP_070210526.1 | 214 | Listeria monocytogenes | 27 | No | No | Yes | 584 | 915 | 1246 | 1577 |
| WP_070254894.1 | 215 | Listeria monocytogenes | 78 | No | Yes | Yes | 585 | 916 | 1247 | 1578 |
| WP_070481549.1 | 216 | Staphylococcus sp. | 71 | No | No | Yes | 586 | 917 | 1248 | 1579 |
| | | HMSC068D08 | | | | | | | | |
| WP_070597291.1 | 217 | Staphylococcus sp. | 71 | No | Yes | Yes | 587 | 918 | 1249 | 1580 |
| | | HMSC068C09 | | | | | | | | |
| WP_070780189.1 | 218 | Clostridium sp. | 23 | Yes | No | Yes | 588 | 919 | 1250 | 1581 |
| | | HMSC19A10 | | | | | | | | |
| WP_070781449.1 | 219 | Listeria monocytogenes | 78 | No | No | Yes | 589 | 920 | 1251 | 1582 |
| WP_070784918.1 | 220 | Listeria monocytogenes | 78 | No | No | Yes | 590 | 921 | 1252 | 1583 |
| WP_070858703.1 | 221 | Staphylococcus sp. | 73 | No | No | Yes | 591 | 922 | 1253 | 1584 |
| | | HMSC077D09 | | | | | | | | |
| WP_071218019.1 | 222 | Paenibacillus sp. | 39 | Yes | Yes | Yes | 592 | 923 | 1254 | 1585 |
| | | LC231 | | | | | | | | |
| WP_071647453.1 | 223 | Clostridium botulinum | 8 | No | No | Yes | 593 | 924 | 1255 | 1586 |
| WP_071661745.1 | 224 | Listeria monocytogenes | 78 | No | No | Yes | 594 | 925 | 1256 | 1587 |
| WP_072217376.1 | 225 | Listeria monocytogenes | 78 | No | No | Yes | 595 | 926 | 1257 | 1588 |
| WP_073206676.1 | 226 | Bacillus safensis | 53 | No | No | Yes | 596 | 927 | 1258 | 1589 |
| WP_073656028.1 | 227 | Pseudomonas | 52 | Yes | No | Yes | 597 | 928 | 1259 | 1590 |
| | | aeruginosa | | | | | | | | |
| WP_073656076.1 | 228 | Pseudomonas | 16 | Yes | No | Yes | 598 | 929 | 1260 | 1591 |
| | | aeruginosa | | | | | | | | |
| WP_074046931.1 | 229 | Listeria monocytogenes | 78 | No | No | Yes | 599 | 930 | 1261 | 1592 |
| WP_074196983.1 | 230 | Pseudomonas | 5 | No | No | Yes | 600 | 931 | 1262 | 1593 |
| | | aeruginosa | | | | | | | | |
| WP_075841482.1 | 231 | Clostridium perfringens | 44 | Yes | No | Yes | 601 | 932 | 1263 | 1594 |
| WP_076231728.1 | 232 | Clostridium botulinum | 18 | Yes | No | Yes | 602 | 933 | 1264 | 1595 |
| | | B2 128 | | | | | | | | |
| WP_076613438.1 | 233 | Clostridioides difficile | 8 | No | No | Yes | 603 | 934 | 1265 | 1596 |
| WP_076934419.1 | 234 | Burkholderia | 75 | Yes | Yes | Yes | 604 | 935 | 1266 | 1597 |
| | | pseudomallei | | | | | | | | |
| WP_077143729.1 | 235 | Enterococcus faecalis | 65 | No | No | Yes | 605 | 936 | 1267 | 1598 |
| WP_077319577.1 | 236 | Listeria monocytogenes | 31 | Yes | No | Yes | 606 | 937 | 1268 | 1599 |
| WP_077700294.1 | 237 | Staphylococcus hominis | 73 | No | No | Yes | 607 | 938 | 1269 | 1600 |
| WP_078177817.1 | 238 | Bacillus mycoides | 8 | No | No | Yes | 608 | 939 | 1270 | 1601 |
| WP_078209883.1 | 239 | Clostridium perfringens | 50 | Yes | Yes | Yes | 609 | 940 | 1271 | 1602 |
| WP_079167461.1 | 240 | Streptomyces | 13 | No | Yes | Yes | 610 | 941 | 1272 | 1603 |
| | | nanshensis | | | | | | | | |
| WP_079253086.1 | 241 | Streptococcus suis | 27 | No | No | Yes | 611 | 942 | 1273 | 1604 |
| WP_079270014.1 | 242 | Streptococcus suis 89- | 27 | No | No | Yes | 612 | 943 | 1274 | 1605 |
| | | 5259 | | | | | | | | |
| WP_079448828.1 | 243 | Listeria monocytogenes | 78 | No | No | Yes | 613 | 944 | 1275 | 1606 |
| WP_079757549.1 | 244 | Streptococcus sp. | 27 | No | No | Yes | 614 | 945 | 1276 | 1607 |
| | | HMSC034E12 | | | | | | | | |
| WP_080118482.1 | 245 | Bacillus cereus HuB4-4 | 53 | No | Yes | Yes | 615 | 946 | 1277 | 1608 |
| WP_080141533.1 | 246 | Listeria monocytogenes | 78 | No | No | Yes | 616 | 947 | 1278 | 1609 |
| WP_080334512.1 | 247 | Bacillus cereus D17 | 49 | No | No | Yes | 617 | 948 | 1279 | 1610 |
| WP_080499134.1 | 248 | Burkholderia | 16 | Yes | Yes | Yes | 618 | 949 | 1280 | 1611 |
| | | pseudomallei | | | | | | | | |
| WP_080624080.1 | 249 | Bacillus licheniformis | 38 | Yes | Yes | Yes | 619 | 950 | 1281 | 1612 |
| WP_080626969.1 | 250 | Bacillus licheniformis | 59 | No | No | Yes | 620 | 951 | 1282 | 1613 |
| WP_081101985.1 | 251 | Bacillus thuringiensis | 49 | No | No | Yes | 621 | 952 | 1283 | 1614 |
| WP_081113934.1 | 252 | Bacillus thuringiensis | 49 | No | No | Yes | 622 | 953 | 1284 | 1615 |
| WP_081115824.1 | 253 | Enterococcus faecalis | 79 | Yes | No | Yes | 623 | 954 | 1285 | 1616 |
| WP_081225183.1 | 254 | Staphylococcus xylosus | 72 | Yes | Yes | Yes | 624 | 955 | 1286 | 1617 |
| WP_081252865.1 | 255 | Bacillus thuringiensis | 49 | No | No | Yes | 625 | 956 | 1287 | 1618 |
| | | serovar alesti | | | | | | | | |
| WP_082870750.1 | 256 | Nocardia terpenica | 3 | Yes | Yes | Yes | 626 | 957 | 1288 | 1619 |
| WP_083983188.1 | 257 | Streptococcus | 54 | No | No | Yes | 627 | 958 | 1289 | 1620 |
| | | pneumoniae | | | | | | | | |
| WP_084882551.1 | 258 | Streptococcus oralis | 57 | No | No | Yes | 628 | 959 | 1290 | 1621 |
| | | subsp. oralis | | | | | | | | |
| WP_085060457.1 | 259 | Staphylococcus | 73 | No | No | Yes | 629 | 960 | 1291 | 1622 |
| | | haemolyticus | | | | | | | | |
| WP_085317587.1 | 260 | Staphylococcus | 73 | No | No | Yes | 630 | 961 | 1292 | 1623 |
| | | lugdunensis | | | | | | | | |
| WP_085430121.1 | 261 | Sporosarcina sp. P37 | 59 | No | No | Yes | 631 | 962 | 1293 | 1624 |
| WP_085547454.1 | 262 | Burkholderia | 75 | Yes | No | Yes | 632 | 963 | 1294 | 1625 |
| | | pseudomallei | | | | | | | | |
| WP_085547864.1 | 263 | Burkholderia | 16 | Yes | No | Yes | 633 | 964 | 1295 | 1626 |
| | | pseudomallei | | | | | | | | |
| WP_085707778.1 | 264 | Listeria monocytogenes | 78 | No | No | Yes | 634 | 965 | 1296 | 1627 |
| WP_087994267.1 | 265 | Bacillus thuringiensis | 78 | No | No | Yes | 635 | 966 | 1297 | 1628 |
| | | serovar konkukian | | | | | | | | |
| WP_088034496.1 | 266 | Bacillus thuringiensis | 8 | No | No | Yes | 636 | 967 | 1298 | 1629 |
| | | serovar navarrensis | | | | | | | | |
| WP_088113025.1 | 267 | Bacillus cereus | 49 | No | Yes | Yes | 637 | 968 | 1299 | 1630 |
| WP_089602000.1 | 268 | Salmonella enterica | 34 | Yes | Yes | Yes | 638 | 969 | 1300 | 1631 |
| WP_089997567.1 | 269 | Leuconostoc gelidum | 54 | No | No | Yes | 639 | 970 | 1301 | 1632 |
| | | subsp. gasicomitatum | | | | | | | | |
| WP_090835057.1 | 270 | Bacillus sp. ok634 | 56 | No | No | Yes | 640 | 971 | 1302 | 1633 |
| WP_094146498.1 | 271 | Shigella sonnei | 87 | Yes | Yes | Yes | 641 | 972 | 1303 | 1634 |
| WP_094396560.1 | 272 | Bacillus cytotoxicus | 62 | No | Yes | Yes | 642 | 973 | 1304 | 1635 |
| WP_096541455.1 | 273 | Enterococcus faecium | 31 | Yes | No | Yes | 643 | 974 | 1305 | 1636 |
| WP_096541458.1 | 274 | Enterococcus faecium | 27 | No | No | Yes | 644 | 975 | 1306 | 1637 |
| WP_096812886.1 | 275 | Listeria monocytogenes | 27 | No | No | Yes | 645 | 976 | 1307 | 1638 |
| WP_096865359.1 | 276 | Listeria monocytogenes | 78 | No | No | Yes | 646 | 977 | 1308 | 1639 |
| WP_096874316.1 | 277 | Listeria monocytogenes | 78 | No | No | Yes | 647 | 978 | 1309 | 1640 |
| WP_096962681.1 | 278 | Escherichia coli | 30 | Yes | No | Yes | 648 | 979 | 1310 | 1641 |
| WP_097501458.1 | 279 | Listeria monocytogenes | 27 | No | No | Yes | 649 | 980 | 1311 | 1642 |
| WP_097517744.1 | 280 | Listeria monocytogenes | 78 | No | No | Yes | 650 | 981 | 1312 | 1643 |
| WP_097528742.1 | 281 | Listeria innocua | 78 | No | No | Yes | 651 | 982 | 1313 | 1644 |
| WP_097529020.1 | 282 | Listeria monocytogenes | 78 | No | No | Yes | 652 | 983 | 1314 | 1645 |
| WP_097807826.1 | 283 | Bacillus thuringiensis | 68 | Yes | No | Yes | 653 | 984 | 1315 | 1646 |
| WP_097877701.1 | 284 | Bacillus cereus | 49 | No | No | Yes | 654 | 985 | 1316 | 1647 |
| WP_097988599.1 | 285 | Bacillus | 8 | No | No | Yes | 655 | 986 | 1317 | 1648 |
| | | pseudomycoides | | | | | | | | |
| WP_098035084.1 | 286 | Lactobacillus sp. | 57 | No | No | Yes | 656 | 987 | 1318 | 1649 |
| | | UMNPBX13 | | | | | | | | |
| WP_098046740.1 | 287 | Lactobacillus sp. | 57 | No | No | Yes | 657 | 988 | 1319 | 1650 |
| | | UMNPBX10 | | | | | | | | |
| WP_098091951.1 | 288 | Bacillus wiedmannii | 8 | No | No | Yes | 658 | 989 | 1320 | 1651 |
| WP_098161179.1 | 289 | Bacillus | 8 | No | No | Yes | 659 | 990 | 1321 | 1652 |
| | | pseudomycoides | | | | | | | | |
| WP_098188118.1 | 290 | Bacillus | 8 | No | No | Yes | 660 | 991 | 1322 | 1653 |
| | | pseudomycoides | | | | | | | | |
| WP_098360688.1 | 291 | Bacillus thuringiensis | 68 | Yes | No | Yes | 661 | 992 | 1323 | 1654 |
| WP_098367614.1 | 292 | Bacillus anthracis | 68 | Yes | Yes | Yes | 662 | 993 | 1324 | 1655 |
| WP_098395666.1 | 293 | Bacillus cereus | 8 | No | No | Yes | 663 | 994 | 1325 | 1656 |
| WP_098417350.1 | 294 | Bacillus cereus | 68 | Yes | No | Yes | 664 | 995 | 1326 | 1657 |
| WP_098431974.1 | 295 | Bacillus cereus | 49 | No | No | Yes | 665 | 996 | 1327 | 1658 |
| WP_099032247.1 | 296 | Lactobacillus | 57 | No | No | Yes | 666 | 997 | 1328 | 1659 |
| | | fermentum | | | | | | | | |
| WP_099434208.1 | 297 | Enterococcus faecalis | 79 | Yes | No | Yes | 667 | 998 | 1329 | 1660 |
| WP_099475464.1 | 298 | Listeria monocytogenes | 78 | No | No | Yes | 668 | 999 | 1330 | 1661 |
| WP_099704252.1 | 299 | Enterococcus faecalis | 65 | No | No | Yes | 669 | 1000 | 1331 | 1662 |
| WP_099770130.1 | 300 | Listeria monocytogenes | 78 | No | No | Yes | 670 | 1001 | 1332 | 1663 |
| WP_099890867.1 | 301 | Streptomyces sp. 61 | 11 | Yes | Yes | Yes | 671 | 1002 | 1333 | 1664 |
| WP_100469701.1 | 302 | Mycobacteroides | 55 | Yes | Yes | Yes | 672 | 1003 | 1334 | 1665 |
| | | abscessus subsp. | | | | | | | | |
| | | abscessus | | | | | | | | |
| WP_101933982.1 | 303 | Virgibacillus | 60 | Yes | Yes | Yes | 673 | 1004 | 1335 | 1666 |
| | | dokdonensis | | | | | | | | |
| WP_102135824.1 | 304 | Listeria monocytogenes | 27 | No | No | Yes | 674 | 1005 | 1336 | 1667 |
| WP_102578340.1 | 305 | Listeria monocytogenes | 78 | No | No | Yes | 675 | 1006 | 1337 | 1668 |
| WP_103629687.1 | 306 | Bacillus thuringiensis | 49 | No | No | Yes | 676 | 1007 | 1338 | 1669 |
| | | serovar alesti | | | | | | | | |
| WP_103686139.1 | 307 | Listeria monocytogenes | 78 | No | No | Yes | 677 | 1008 | 1339 | 1670 |
| WP_104869821.1 | 308 | Listeria monocytogenes | 27 | No | No | Yes | 678 | 1009 | 1340 | 1671 |
| WP_105241906.1 | 309 | Shigella dysenteriae | 20 | Yes | No | Yes | 679 | 1010 | 1341 | 1672 |
| WP_107539588.1 | 310 | Staphylococcus | 73 | No | No | Yes | 680 | 1011 | 1342 | 1673 |
| | | simulans | | | | | | | | |
| WP_107639985.1 | 311 | Staphylococcus hominis | 37 | No | No | Yes | 681 | 1012 | 1343 | 1674 |
| WP_109978683.1 | 312 | Streptomyces sp. | 11 | Yes | No | Yes | 682 | 1013 | 1344 | 1675 |
| | | CS090A | | | | | | | | |
| WP_111718485.1 | 313 | Streptococcus | 57 | No | No | Yes | 683 | 1014 | 1345 | 1676 |
| | | pasteurianus | | | | | | | | |
| WP_113850194.1 | 314 | Enterococcus | 79 | Yes | Yes | Yes | 684 | 1015 | 1346 | 1677 |
| | | gallinarum | | | | | | | | |
| WP_113851201.1 | 315 | Enterococcus faecalis | 79 | Yes | No | Yes | 685 | 1016 | 1347 | 1678 |
| WP_113936808.1 | 316 | Bacillus sp. DB-2 | 8 | No | No | Yes | 686 | 1017 | 1348 | 1679 |
| WP_114679402.1 | 317 | Enterococcus faecalis | 65 | No | No | Yes | 687 | 1018 | 1349 | 1680 |
| WP_114980936.1 | 318 | Clostridium botulinum | 21 | No | No | Yes | 688 | 1019 | 1350 | 1681 |
| WP_115205932.1 | 319 | Escherichia coli | 42 | Yes | No | Yes | 689 | 1020 | 1351 | 1682 |
| WP_115261900.1 | 320 | Streptococcus | 54 | No | No | Yes | 690 | 1021 | 1352 | 1683 |
| | | dysgalactiae | | | | | | | | |
| WP_115333169.1 | 321 | Escherichia coli | 1 | Yes | Yes | Yes | 691 | 1022 | 1353 | 1684 |
| WP_115597271.1 | 322 | Corynebacterium | 47 | Yes | Yes | Yes | 692 | 1023 | 1354 | 1685 |
| | | jeikeium | | | | | | | | |
| WP_117232108.1 | 323 | Staphylococcus aureus | 71 | No | No | Yes | 693 | 1024 | 1355 | 1686 |
| | | subsp. aureus | | | | | | | | |
| WP_118991797.1 | 324 | Bacillus thuringiensis | 49 | No | No | Yes | 694 | 1025 | 1356 | 1687 |
| | | LM1212 | | | | | | | | |
| WP_119503980.1 | 325 | Staphylococcus | 73 | No | No | Yes | 695 | 1026 | 1357 | 1688 |
| | | haemolyticus | | | | | | | | |
| WP_120150877.1 | 326 | Listeria monocytogenes | 27 | No | No | Yes | 696 | 1027 | 1358 | 1689 |
| WP_121590887.1 | 327 | Bacillus subtilis subsp. | 36 | No | Yes | Yes | 697 | 1028 | 1359 | 1690 |
| | | subtilis | | | | | | | | |
| WP_123159886.1 | 328 | Streptococcus sp. | 57 | No | No | Yes | 698 | 1029 | 1360 | 1691 |
| | | AM43-2AT | | | | | | | | |
| WP_123257979.1 | 329 | Bacillus circulans | 62 | No | No | Yes | 699 | 1030 | 1361 | 1692 |
| WP_123850201.1 | 330 | Burkholderia | 75 | Yes | No | Yes | 700 | 1031 | 1362 | 1693 |
| | | pseudomallei | | | | | | | | |
| WP_123850205.1 | 331 | Burkholderia | 16 | Yes | No | Yes | 701 | 1032 | 1363 | 1694 |
| | | pseudomallei | | | | | | | | |
| WP_124096936.1 | 332 | Pseudomonas | 5 | No | No | Yes | 702 | 1033 | 1364 | 1695 |
| | | aeruginosa | | | | | | | | |
| WP_124207899.1 | 333 | Pseudomonas | 5 | No | No | Yes | 703 | 1034 | 1365 | 1696 |
| | | aeruginosa | | | | | | | | |
| WP_124982970.1 | 334 | Ralstonia | 5 | No | No | Yes | 704 | 1035 | 1366 | 1697 |
| | | solanacearum | | | | | | | | |
| WP_125180711.1 | 335 | Enterococcus faecalis | 65 | No | No | Yes | 705 | 1036 | 1367 | 1698 |
| WP_125184747.1 | 336 | Streptococcus | 57 | No | No | Yes | 706 | 1037 | 1368 | 1699 |
| | | pneumoniae | | | | | | | | |
| WP_125387060.1 | 337 | Enterobacter asburiae | 4 | Yes | No | Yes | 707 | 1038 | 1369 | 1700 |
| WP_125742262.1 | 338 | Streptomyces sp. | 28 | Yes | Yes | Yes | 708 | 1039 | 1370 | 1701 |
| | | WAC01280 | | | | | | | | |
| WP_128382843.1 | 339 | Staphylococcus | 71 | No | No | Yes | 709 | 1040 | 1371 | 1702 |
| | | schleiferi | | | | | | | | |
| WP_128435673.1 | 340 | Enterococcus hirae | 31 | Yes | No | Yes | 710 | 1041 | 1372 | 1703 |
| WP_128435701.1 | 341 | Enterococcus hirae | 27 | No | No | Yes | 711 | 1042 | 1373 | 1704 |
| WP_129133149.1 | 342 | Clostridium tetani | 23 | Yes | Yes | Yes | 712 | 1043 | 1374 | 1705 |
| WP_129137749.1 | 343 | Bacillus subtilis | 22 | No | Yes | No | | | | |
| WP_129343574.1 | 344 | Enterococcus faecalis | 65 | No | No | Yes | 713 | 1044 | 1375 | 1706 |
| WP_131019985.1 | 345 | Clostridioides difficile | 27 | No | No | Yes | 714 | 1045 | 1376 | 1707 |
| WP_131020076.1 | 346 | Clostridioides difficile | 31 | Yes | No | Yes | 715 | 1046 | 1377 | 1708 |
| WP_131321169.1 | 347 | Burkholderia sp. | 0 | Yes | Yes | Yes | 716 | 1047 | 1378 | 1709 |
| | | WK1.1f | | | | | | | | |
| WP_131931307.1 | 348 | Bacillus thuringiensis | 78 | No | No | Yes | 717 | 1048 | 1379 | 1710 |
| WP_135025396.1 | 349 | Carnobacterium | 54 | No | No | Yes | 718 | 1049 | 1380 | 1711 |
| | | divergens | | | | | | | | |
| WP_136074427.1 | 350 | Streptococcus pyogenes | 85 | No | Yes | Yes | 719 | 1050 | 1381 | 1712 |
| WP_136074428.1 | 351 | Streptococcus pyogenes | 33 | Yes | Yes | Yes | 720 | 1051 | 1382 | 1713 |
| WP_136106493.1 | 352 | Streptococcus pyogenes | 54 | No | No | Yes | 721 | 1052 | 1383 | 1714 |
| WP_136111045.1 | 353 | Streptococcus pyogenes | 54 | No | No | Yes | 722 | 1053 | 1384 | 1715 |
| WP_136118942.1 | 354 | Streptococcus pyogenes | 54 | No | No | Yes | 723 | 1054 | 1385 | 1716 |
| WP_136266174.1 | 355 | Streptococcus pyogenes | 54 | No | No | Yes | 724 | 1055 | 1386 | 1717 |
| YP_001089468.1 | 356 | Clostridioides difficile | 74 | No | No | No | | | | |
| | | 630 | | | | | | | | |
| YP_001271396.1 | 357 | Lactobacillus reuteri | 57 | No | No | No | | | | |
| | | DSM 20016 | | | | | | | | |
| YP_001376196.1 | 358 | Bacillus cytotoxicus | 62 | No | No | No | | | | |
| | | NVH 391-98 | | | | | | | | |
| YP_001384783.1 | 359 | Clostridium botulinum | 8 | No | No | No | | | | |
| | | A str. ATCC 19397 | | | | | | | | |
| YP_001392519.1 | 360 | Clostridium botulinum | 21 | No | Yes | No | | | | |
| | | F str. Langeland | | | | | | | | |
| ΥP_001604091.1 | 361 | Staphylococcus virus | 73 | No | No | No | | | | |
| | | phiMR11 | | | | | | | | |
| ΥP_001646422.1 | 362 | Bacillus | 8 | No | No | No | | | | |
| | | weihenstephanensis | | | | | | | | |
| | | KBAB4 | | | | | | | | |
| ΥP_001886479.1 | 363 | Clostridium botulinum | 81 | No | Yes | No | | | | |
| | | B str. Eklund 17B | | | | | | | | |
| | | (NRP) | | | | | | | | |
| ΥP_002336631.1 | 364 | Bacillus cereus AH187 | 35 | No | No | No | | | | |
| ΥP_002736920.1 | 365 | Streptococcus | 57 | No | No | No | | | | |
| | | pneumoniae JJA | | | | | | | | |
| ΥP_002747001.1 | 366 | Streptococcus equi | 54 | No | No | No | | | | |
| | | subsp. equi 4047 | | | | | | | | |
| ΥP_002804732.1 | 367 | Clostridium botulinum | 24 | No | Yes | No | | | | |
| | | A2 str. Kyoto | | | | | | | | |
| ΥP_003251752.1 | 368 | Geobacillus sp. | 56 | No | No | No | | | | |
| | | Y412MC61 | | | | | | | | |
| ΥP_003358736.1 | 369 | Mycobacterium virus | 32 | No | No | No | | | | |
| | | Peaches | | | | | | | | |
| ΥP_003445547.1 | 370 | Streptococcus mitis B6 | 57 | No | No | No | | | | |
| ΥP_003472505.1 | 371 | Staphylococcus | 73 | No | No | No | | | | |
| | | lugdunensis HKU09-01 | | | | | | | | |
| ΥP_003880342.1 | 372 | Streptococcus | 57 | No | No | No | | | | |
| | | pneumoniae 670-6B | | | | | | | | |
| ΥP_004301563.1 | 373 | Brochothrix phage BL3 | 57 | No | No | No | | | | |
| ΥP_004586821.1 | 374 | Geobacillus | 56 | No | No | No | | | | |
| | | thermoglucosidasius | | | | | | | | |
| | | C56-YS93 | | | | | | | | |
| ΥP_005549228.1 | 375 | Bacillus | 36 | No | No | No | | | | |
| | | amyloliquefaciens XH7 | | | | | | | | |
| ΥP_005679179.1 | 376 | Clostridium botulinum | 8 | No | Yes | No | | | | |
| | | H04402 065 | | | | | | | | |
| ΥP_005759947.1 | 377 | Staphylococcus | 71 | No | No | No | | | | |
| | | lugdunensis N920143 | | | | | | | | |
| ΥP_005869510.1 | 378 | Lactococcus lactis | 54 | No | No | No | | | | |
| | | subsp. lactis CV56 | | | | | | | | |
| ΥP_006082695.1 | 379 | Streptococcus suis D12 | 85 | No | No | No | | | | |
| ΥP_006538656.1 | 380 | Enterococcus faecalis | 65 | No | No | No | | | | |
| | | D32 | | | | | | | | |
| ΥP_006906969.1 | 381 | Streptomyces phage | 17 | No | No | No | | | | |
| | | SV1 | | | | | | | | |
| ΥP_006906969.1 | 382 | Streptomyces | 17 | No | No | Yes | 725 | 1056 | 1387 | 1718 |
| | | venezuelae | | | | | | | | |
| ΥP_006907228.1 | 383 | Streptomyces virus TG1 | 2 | No | Yes | No | | | | |
| ΥP_008050906.1 | 384 | Streptomyces phage | 19 | No | No | No | | | | |
| | | Lika | | | | | | | | |
| ΥP_008051452.1 | 385 | Streptomyces phage | 19 | No | No | No | | | | |
| | | Sujidade | | | | | | | | |
| ΥP_008060284.1 | 386 | Streptomyces phage | 19 | No | No | No | | | | |
| | | Zemlya | | | | | | | | |
| YP_009200991.1 | 387 | Streptomyces phage | 19 | No | No | No | | | | |
| | | Lannister | | | | | | | | |
| YP_009208329.1 | 388 | Streptomyces phage | 66 | No | No | No | | | | |
| | | Amela | | | | | | | | |
| YP_009214300.1 | 389 | Mycobacterium phage | 45 | No | No | No | | | | |
| | | Theia | | | | | | | | |
| YP_009637934.1 | 390 | Mycobacterium virus | 48 | No | Yes | No | | | | |
| | | Benedict | | | | | | | | |
| YP_009638863.1 | 391 | Mycobacterium virus | 45 | No | Yes | No | | | | |
| | | Rebeuca | | | | | | | | |
| YP_189066.1 | 392 | Staphylococcus | 37 | No | Yes | No | | | | |
| | | epidermidis RP62A | | | | | | | | |
| YP_353073.2 | 393 | Rhodobacter | 10 | No | Yes | No | | | | |
| | | sphaeroides 2.4.1 | | | | | | | | |
| YP_706485.1 | 394 | Rhodococcus jostii | 12 | No | Yes | No | | | | |
| | | RHA1 | | | | | | | | |
| YP_950630.1 | 395 | Staphylococcus | 73 | No | No | Yes | 726 | 1057 | 1388 | 1719 |
| | | epidermidis | | | | | | | | |

C = Cluster;
New C = New Cluster;
Cent = Centroid;
New R = New recombinase;
L = attL;
R = attR;
B = attB;
R = attP
⁺Alternative predicted recognition sites are provided in Table 2.
^{T} Thermophilic organism

TABLE 2
Recombinases and cognate recognition sites with alternative recognition sites

| | | Alternative Predicted | | | | Alternative Predicted | | | |
|---|---|---|---|---|---|---|---|---|---|
| | | Recognition Sites | | | | Recognition Sites | | | |
| Protein Accession | | SEQ ID NO: | | | | SEQ ID NO: | | | |
| Number | Organism | L | R | B | P | L | R | B | P |
| WP_005908927.1 | Fusobacterium | 1720 | 1776 | 1832 | 1888 | | | | |
| | nucleatum subsp. | | | | | | | | |
| | animalis F0419 | | | | | | | | |
| WP_069019758.1 | Listeria monocytogenes | 1721 | 1777 | 1833 | 1889 | | | | |
| WP_071661745.1 | Listeria monocytogenes | 1722 | 1778 | 1834 | 1890 | 1944 | 1949 | 1954 | 1959 |
| WP_000286204.1 | Bacillus cereus MSX- | 1723 | 1779 | 1835 | 1891 | | | | |
| | D12 | | | | | | | | |
| WP_000650392.1 | Bacillus thuringiensis | 1724 | 1780 | 1836 | 1892 | | | | |
| | serovar kurstaki str. | | | | | | | | |
| | YBT-1520 | | | | | | | | |
| WP_002475509.1 | Staphylococcus | 1725 | 1781 | 1837 | 1893 | | | | |
| | epidermidis 14.1.R1.SE | | | | | | | | |
| WP_011276651.1 | Staphylococcus | 1726 | 1782 | 1838 | 1894 | | | | |
| | haemolyticus | | | | | | | | |
| | JCSC1435 | | | | | | | | |
| WP_003770016.1 | Listeria innocua | 1727 | 1783 | 1839 | 1895 | | | | |
| WP_131931307.1 | Bacillus thuringiensis | 1728 | 1784 | 1840 | 1896 | | | | |
| WP_059456121.1 | Burkholderia | 1729 | 1785 | 1841 | 1897 | | | | |
| | vietnamiensis | | | | | | | | |
| WP_010990844.1 | Listeria innocua | 1730 | 1786 | 1842 | 1898 | | | | |
| | Clip11262 | | | | | | | | |
| WP_098360688.1 | Bacillus thuringiensis | 1731 | 1787 | 1843 | 1899 | | | | |
| WP_061660420.1 | Bacillus cereus | 1732 | 1788 | 1844 | 1900 | | | | |
| WP_003731150.1 | Listeria monocytogenes | 1733 | 1789 | 1845 | 1901 | | | | |
| WP_097501458.1 | Listeria monocytogenes | 1734 | 1790 | 1846 | 1902 | | | | |
| WP_063280150.1 | Staphylococcus | 1735 | 1791 | 1847 | 1903 | | | | |
| | epidermidis | | | | | | | | |
| WP_053028958.1 | Staphylococcus | 1736 | 1792 | 1848 | 1904 | 1945 | 1950 | 1955 | 1960 |
| | haemolyticus | | | | | | | | |
| WP_002349497.1 | Enterococcus faecium | 1737 | 1793 | 1849 | 1905 | | | | |
| | R501 | | | | | | | | |
| WP_033654380.1 | Enterococcus faecium | 1738 | 1794 | 1850 | 1906 | | | | |
| | R501 | | | | | | | | |
| WP_044791785.1 | Bacillus thuringiensis | 1739 | 1795 | 1851 | 1907 | | | | |
| WP_033943750.1 | Pseudomonas | 1740 | 1796 | 1852 | 1908 | | | | |
| | aeruginosa | | | | | | | | |
| WP_057385580.1 | Pseudomonas | 1741 | 1797 | 1853 | 1909 | | | | |
| | aeruginosa | | | | | | | | |
| WP_011017563.1 | Streptococcus pyogenes | 1742 | 1798 | 1854 | 1910 | | | | |
| | MGAS10270 | | | | | | | | |
| WP_136111045.1 | Streptococcus pyogenes | 1743 | 1799 | 1855 | 1911 | 1946 | 1951 | 1956 | 1961 |
| WP_115261900.1 | Streptococcus | 1744 | 1800 | 1856 | 1912 | | | | |
| | dysgalactiae | | | | | | | | |
| WP_081113934.1 | Bacillus thuringiensis | 1745 | 1801 | 1857 | 1913 | | | | |
| WP_118991797.1 | Bacillus thuringiensis | 1746 | 1802 | 1858 | 1914 | | | | |
| | LM1212 | | | | | | | | |
| WP_015891191.1 | Brevibacillus brevis | 1747 | 1803 | 1859 | 1915 | | | | |
| | NBRC 100599 | | | | | | | | |
| WP_124982970.1 | Ralstonia | 1748 | 1804 | 1860 | 1916 | | | | |
| | solanacearum | | | | | | | | |
| WP_096962681.1 | Escherichia coli | 1749 | 1805 | 1861 | 1917 | | | | |
| WP_021534391.1 | Escherichia coli HVH | 1750 | 1806 | 1862 | 1918 | | | | |
| | 147 (4-5893887) | | | | | | | | |
| WP_037835118.1 | Streptomyces sp. NRRL | 1751 | 1807 | 1863 | 1919 | | | | |
| | S-455 | | | | | | | | |
| WP_002359484.1 | Enterococcus faecalis | 1752 | 1808 | 1864 | 1920 | 1947 | 1952 | 1957 | 1962 |
| WP_002381434.1 | Enterococcus faecalis | 1753 | 1809 | 1865 | 1921 | | | | |
| WP_043503403.1 | Pseudomonas | 1754 | 1810 | 1866 | 1922 | | | | |
| | aeruginosa | | | | | | | | |
| WP_057383473.1 | Pseudomonas | 1755 | 1811 | 1867 | 1923 | | | | |
| | aeruginosa | | | | | | | | |
| WP_002399935.1 | Enterococcus faecalis | 1756 | 1812 | 1868 | 1924 | | | | |
| | TX0309B | | | | | | | | |
| WP_069500683.1 | Bacillus licheniformis | 1757 | 1813 | 1869 | 1925 | | | | |
| WP_079448828.1 | Listeria monocytogenes | 1758 | 1814 | 1870 | 1926 | | | | |
| WP_070030387.1 | Listeria monocytogenes | 1759 | 1815 | 1871 | 1927 | | | | |
| WP_003727736.1 | Listeria monocytogenes | 1760 | 1816 | 1872 | 1928 | | | | |
| | J0161 | | | | | | | | |
| WP_072217376.1 | Listeria monocytogenes | 1761 | 1817 | 1873 | 1929 | | | | |
| WP_113936808.1 | Bacillus sp. DB-2 | 1762 | 1818 | 1874 | 1930 | | | | |
| WP_014636355.1 | Streptococcus suis | 1763 | 1819 | 1875 | 1931 | | | | |
| WP_079253086.1 | Streptococcus suis | 1764 | 1820 | 1876 | 1932 | | | | |
| WP_104869821.1 | Listeria monocytogenes | 1765 | 1821 | 1877 | 1933 | | | | |
| WP_096812886.1 | Listeria monocytogenes | 1766 | 1822 | 1878 | 1934 | | | | |
| WP_014929968.1 | Listeria monocytogenes | 1767 | 1823 | 1879 | 1935 | | | | |
| | FSL N1-017 | | | | | | | | |
| WP_064034122.1 | Listeria monocytogenes | 1768 | 1824 | 1880 | 1936 | | | | |
| WP_102135824.1 | Listeria monocytogenes | 1769 | 1825 | 1881 | 1937 | | | | |
| WP_128435673.1 | Enterococcus hirae | 1770 | 1826 | 1882 | 1938 | | | | |
| WP_128435701.1 | Enterococcus hirae | 1771 | 1827 | 1883 | 1939 | | | | |
| SHX05262.1 | Mycobacteroides | 1772 | 1828 | 1884 | 1940 | | | | |
| | abscessus subsp. | | | | | | | | |
| | abscessus | | | | | | | | |
| WP_131019985.1 | Clostridioides difficile | 1773 | 1829 | 1885 | 1941 | | | | |
| WP_131020076.1 | Clostridioides difficile | 1774 | 1830 | 1886 | 1942 | | | | |
| NP_831691.1 | Bacillus cereus ATCC | 1775 | 1831 | 1887 | 1943 | 1948 | 1953 | 1958 | 1963 |
| | 14579 | | | | | | | | |

### Example 3. Recombinases from Thermophilic Organisms

[0222] Presented herein is a group of sequences of recombinases and at least two pairs of DNA target sites (attL/attR; attB/attP) for recombinase genes that were identified from thermophilic organisms. Thermophiles are microorganisms that grow at above-normal temperatures, and thus, proteins identified from thermophilic organisms, are inherently more thermostable than proteins identified from non-thermophilic organisms.

[0223] Thermostable enzymes have proven incredibly valuable for biotechnological applications as they allow for enhanced function at elevated temperature. For example, Taq DNA polymerase is a naturally thermostable enzyme that remains functional even after being exposed to near boiling (95° C.+) temperatures and paved the way for the development of PCR. Thermostable recombinase variants are important for generating high-efficiency recombination in both prokaryotic and eukaryotic cells. For example, FlpE—an evolved thermostable variant of the S cerevisae recombinase Flp is more active than the wildtype version, including in bacteria, plants, and mice.

[0224] Natural recombinases from thermophilic organisms are therefore important for performing high efficiency recombination over a broad temperature range. Recombinases from thermophiles were identified by the taxonomy of the host organism in which their recognition sites were identified. Newly identified thermophilic recombinase sequences and their DNA targets can be found in Table 1, marked by a “T”.

### Example 4. Site-Specific Recombinases with Innate Nuclear Localization Signal Sequences

[0225] Site-specific DNA recombinases evolved to function in prokaryotes, but some of the most impactful applications of DNA recombination are in eukaryotes (e.g., for genome engineering of plants and mammalian cells). For efficient recombination to proceed in eukaryotes, prokaryotic derived recombinases are effectively transported to the nucleus. Certain natural recombinases, such as Cre recombinase, have nuclear localization signals (NLS) inherent in their sequence that allow for their efficient transport into the nucleus. NLS sequences can be also be appended to the N or C terminus of a site-specific recombinase that otherwise does not have a natural NLS-like signal embedded in its sequence. Although engineered recombinase-NLS fusion proteins can then move more efficiently into the nucleus than their wildtype parent, not all recombinases tolerate the NLS fusion and/or exhibit an increased nuclear transport function that puts them on par with natural NLS containing recombinases like Cre.

[0226] The publicly available NucPred software (can be accessed at nucpred.bioinfo.se/nucpred/) and the publicly available NLStradamus software (can be accessed at moseslab.csb.utoronto.ca/NLStradamus/) were used to determine if any of the 331 new site-specific recombinases that were identified with described target sites contain NLS-like sequences. NLS-like signal sequences were predicted for proteins that either had a NucPred score >0.8 (Brameier, 2007) or a 2 state HMM static NLStradamus score >0.6 (Nguyen Ba AN, 2009). Herein reported are the identification of 54 site-specific recombinases (from 18 unique clusters) and their associated DNA substrates for recombinases that inherently contain natural NLS-like signals in their amino acid sequences. NLS-containing recombinases and cognate recognition sites are provided in Table 3 (the corresponding recognition sites can be found in Table 1 by matching the Protein Accession Number and Organism).

TABLE 3
NLS-Containing Recombinases

| Protein Accession | |
|---|---|
| Number | Organism |
| WP_003199542.1 | Bacillus pseudomycoides |
| WP_071647453.1 | Clostridium botulinum |
| WP_046655502.1 | Clostridium tetani |
| WP_002349497.1 | Enterococcus faecium R501 |
| EOE27531.1 | Enterococcus faecalis EnGen0285 |
| WP_009269239.1 | Enterococcus faecium |
| WP_079167461.1 | Streptomyces nanshensis |
| WP_129133149.1 | Clostridium tetani |
| WP_038521242.1 | Streptomyces albulus |
| WP_016570474.1 | Streptomyces albulus ZPM |
| WP_003731148.1 | Listeria monocytogenes FSL N1-017 |
| WP_060868949.1 | Listeria monocytogenes |
| WP_128435673.1 | Enterococcus hirae |
| WP_064034122.1 | Listeria monocytogenes |
| WP_077319577.1 | Listeria monocytogenes |
| WP_089602000.1 | Salmonella enterica |
| NP_831691.1 | Bacillus cereus ATCC 14579 |
| WP_000872535.1 | Bacillus cereus BAG3X2-2 |
| WP_000872533.1 | Bacillus sp. 2D03 |
| WP_097877701.1 | Bacillus cereus |
| AND10894.1 | Bacillus thuringiensis serovar alesti |
| WP_081252865.1 | Bacillus thuringiensis serovar alesti |
| WP_098431974.1 | Bacillus cereus |
| WP_103629687.1 | Bacillus thuringiensis serovar alesti |
| WP_081113934.1 | Bacillus thuringiensis |
| WP_001044789.1 | Streptococcus agalactiae CCUG 39096 A |
| WP_065733410.1 | Streptococcus agalactiae |
| WP_083983188.1 | Streptococcus pneumoniae |
| WP_013524454.1 | Geobacillus sp. Y412MC61 |
| WP_123159886.1 | Streptococcus sp. AM43-2AT |
| WP_000633509.1 | Streptococcus pneumoniae 670-6B |
| WP_046559965.1 | Bacillus velezensis |
| WP_052497231.1 | Bacillus thuringiensis serovar morrisoni |
| WP_123257979.1 | Bacillus circulans |
| EOK04340.1 | Enterococcus faecalis EnGen0367 |
| WP_002399935.1 | Enterococcus faecalis TX0309B |
| WP_002409538.1 | Enterococcus faecalis TX0645 |
| WP_002416055.1 | Enterococcus faecalis ERV103 |
| WP_010717149.1 | Enterococcus faecalis EnGen0115 |
| WP_010826647.1 | Enterococcus faecalis EnGen0359 |
| WP_025191276.1 | Enterococcus faecalis EnGen0367 |
| WP_099704252.1 | Enterococcus faecalis |
| WP_002359484.1 | Enterococcus faecalis |
| WP_002381434.1 | Enterococcus faecalis |
| WP_010708035.1 | Enterococcus faecalis EnGen0061 |
| WP_048962262.1 | Enterococcus faecalis |
| WP_077143729.1 | Enterococcus faecalis |
| WP_114679402.1 | Enterococcus faecalis |
| WP_125180711.1 | Enterococcus faecalis |
| WP_129343574.1 | Enterococcus faecalis |
| WP_081225183.1 | Staphylococcus xylosus |
| WP_085707778.1 | Listeria monocytogenes |
| WP_113850194.1 | Enterococcus gallinarum |
| WP_051428004.1 | Paenibacillus larvae subsp. larvae DSM 25719 |

### Example 5. Site-Specific Recombinases with Valuable DNA Target Sequences

[0227] Recombinase genes where the DNA target sites themselves were interesting because they do not resemble any known DNA target site for a site-specific recombinase were identified.

[0228] Note that site-specific recombinases can be used in an engineered context to recombine at their given target site genomic location in arbitrary engineered nucleic acids (FIG. 4). Because so few site-specific recombinase target sites were previously known (only 64), for most researchers to be able to take advantage of recombinases, they first had (1) laboriously engineer the recombinase target site into a genomic location of choice (2) apply the recombinase to rearrange DNA at the newly added insertion site. Herein are provided site-specific recombinases with recognition sites already present in the genomes of clinically relevant and/or research-based model organisms. These recombinases are valuable because they may be directly applied in the organism that already contains the recombinase recognition sequences without having to perform the initial, laborious target site engineering work (FIG. 5).

[0229] Thus, these recombinases, in some embodiments, can be used directly to engineer the genomes of the bacterial organism that contains the identified DNA substrates with no prior engineering work. This is particularly valuable for the introduction of new DNA into a genome (for research, therapeutic or industrial purposes) and especially for organisms that are otherwise challenging to manipulate with current genetic engineering approaches, such as gram-positive bacteria. Co-transformation of an engineered nucleic acid vector that results in the expression of a recombinase and a donor DNA vector that contains one recombinase recognition site could be used to integrate the donor DNA specifically and directly into the natural bacterial genome at the precise location that naturally contains the second recombinase recognition sequence.

[0230] Of the 331 characterized site-specific recombinases disclosed here, 62 have DNA target sites in bacteria from genera for which no previously known site-specific recombinase had a target site. These genera are now “unlocked” for direct genome engineering. The 62 site specific recombinases and the genera that they may be used in are provided in Table 4 (the corresponding recognition sites can be found in Table 1 by matching the Protein Accession Number and Organism).

TABLE 4
Recombinase/recognition site pairs of new genera

| Protein Accession | | |
|---|---|---|
| Number | Organism | Genus |
| WP_115597271.1 | Corynebacterium jeikeium | Corynebacterium |
| WP_015407430.1 | Dehalococcoides mccartyi BTF08 | Dehalococcoides |
| WP_015407429.1 | Dehalococcoides mccartyi BTF08 | Dehalococcoides |
| WP_015407431.1 | Dehalococcoides mccartyi BTF08 | Dehalococcoides |
| WP_125387060.1 | Enterobacter asburiae | Enterobacter |
| KDF51021.1 | Enterobacter roggenkampii CHS 79 | Enterobacter |
| WP_115333169.1 | Escherichia coli | Escherichia |
| WP_024233971.1 | Escherichia coli STEC O174:H46 str. 1-151 | Escherichia |
| WP_053903616.1 | Escherichia coli | Escherichia |
| GDD80774.1 | Escherichia coli | Escherichia |
| WP_061355600.1 | Escherichia coli | Escherichia |
| WP_096962681.1 | Escherichia coli | Escherichia |
| WP_021534391.1 | Escherichia coli HVH 147 (4-5893887) | Escherichia |
| WP_115205932.1 | Escherichia coli | Escherichia |
| WP_000709069.1 | Escherichia coli 5.0588 | Escherichia |
| WP_000709099.1 | Escherichia coli 55989 | Escherichia |
| WP_070080197.1 | Escherichia coli O157:H7 | Escherichia |
| NP_415076.1 | Escherichia coli str. K-12 substr. MG1655 | Escherichia |
| WP_008698549.1 | Fusobacterium ulcerans 12-1B | Fusobacterium |
| WP_060798679.1 | Fusobacterium nucleatum | Fusobacterium |
| WP_005908927.1 | Fusobacterium nucleatum subsp. animalis F0419 | Fusobacterium |
| WP_008700773.1 | Fusobacterium nucleatum subsp. polymorphum F0401 | Fusobacterium |
| EFD80439.2 | Fusobacterium nucleatum subsp. animalis D11 | Fusobacterium |
| WP_045667426.1 | Geobacter sulfurreducens | Geobacter |
| WP_003514343.1 | Hungateiclostridium thermocellum JW20 | Hungateiclostridium |
| WP_089997567.1 | Leuconostoc gelidum subsp. gasicomitatum | Leuconostoc |
| WP_069482207.1 | Lysinibacillus fusiformis | Lysinibacillus |
| WP_100469701.1 | Mycobacteroides abscessus subsp. abscessus | Mycobacteroides |
| SHX05262.1 | Mycobacteroides abscessus subsp. abscessus | Mycobacteroides |
| WP_082870750.1 | Nocardia terpenica | Nocardia |
| WP_115597271.1 | Corvnebacterium jeikeium | Corvnebacterium |
| WP_071218019.1 | Paenibacillus sp. LC231 | Paenibacillus |
| WP_064963684.1 | Paenibacillus polymvxa | Paenibacillus |
| WP_051428004.1 | Paenibacillus larvae subsp. larvae DSM 25719 | Paenibacillus |
| WP_039660878.1 | Pantoea sp. MBLJ3 | Pantoea |
| WP_031673611.1 | Pseudomonas aeruginosa | Pseudomonas |
| WP_033943750.1 | Pseudomonas aeruginosa | Pseudomonas |
| WP_043503403.1 | Pseudomonas aeruginosa | Pseudomonas |
| WP_057383473.1 | Pseudomonas aeruginosa | Pseudomonas |
| WP_057385580.1 | Pseudomonas aeruginosa | Pseudomonas |
| WP_058016331.1 | Pseudomonas aeruginosa | Pseudomonas |
| WP_074196983.1 | Pseudomonas aeruginosa | Pseudomonas |
| WP_124096936.1 | Pseudomonas aeruginosa | Pseudomonas |
| WP_124207899.1 | Pseudomonas aeruginosa | Pseudomonas |
| WP_019725860.1 | Pseudomonas aeruginosa 213BR | Pseudomonas |
| WP_023107160.1 | Pseudomonas aeruginosa BL04 | Pseudomonas |
| WP_023115516.1 | Pseudomonas aeruginosa BWHPSA021 | Pseudomonas |
| WP_073656076.1 | Pseudomonas aeruginosa | Pseudomonas |
| WP_073656028.1 | Pseudomonas aeruginosa | Pseudomonas |
| WP_064297673.1 | Ralstonia solanacearum | Ralstonia |
| WP_124982970.1 | Ralstonia solanacearum | Ralstonia |
| WP_089602000.1 | Salmonella enterica | Salmonella |
| WP_001233549.1 | Shigella boydii | Shigella |
| WP_105241906.1 | Shigella dysenteriae | Shigella |
| WP_094146498.1 | Shigella sonnei | Shigella |
| WP_066864475.1 | Sphingobium sp. TCM1 | Sphingobium |
| WP_085430121.1 | Sporosarcina sp. P37 | Sporosarcina |
| WP_053497239.1 | Stenotrophomonas maltophilia | Stenotrophomonas |
| WP_065724346.1 | Stenotrophomonas maltophilia | Stenotrophomonas |
| KIS38487.1 | Stenotrophomonas maltophilia WJ66 | Stenotrophomonas |
| WP_028992649.1 | Thermoanaerobacter thermocopriae JCM 7501 | Thermoanaerobacter |
| WP_101933982.1 | Virgibacillus dokdonensis | Virgibacillus |
| WP_044751504.1 | Xanthomonas oryzae pv. oryzicola | Xanthomonas |

### Sequence Listing

TABLE 5

| SEQ | |
|---|---|
| ID | |
| NO: | Amino acid Sequence |
| 1 | MKRAALYIRVSTMEQAKEGYSIPAQTDKLKAFAKAKDMAVAKVYTDPGFSGAKMERPALQEMIS |
| | DIQNKKIDVVLVYKLDRLSRSQKNTLYLIEDVFLKNNVDFISMQESFDTSTPFGRATIGMLSVFAQL |
| | ERDTITERMHMGRTERAKQGYYHGSGIVPLGYDYVHGELIINDYEAQIIQEIYDLYVNQGKGQQYI |
| | TKRMVAKYPDKVKTLTIVKYALTNPLYIGKISWDGKVYDGHHSPIIDKSMYDKAQEIIARMAQKG |
| | GEQHGNQLGLLLGITYCGKCGAEVFRYVSGGKKYRYNYYMCRSVKKMLPSLVKDWNCKQPSLR |
| | QEVVEKKVIDSLKSLDFKKIERELKQVENKTKSKITTINNQISKKHNEKQKILDLYQYGTFDVTMLN |
| | ERMKKIDNEINALTANIANLEGTKSESLINKLETLKTFNWETETTENKILIIKEFVERIELFDDEVIIKY |
| | KF |
| 2 | MRALVVIRLSRVTDATTSPERQLESCQQLCAQRGWDVVGVAEDLDVSGAVDPFDRKRRPNLARW |
| | LAFEEQPFDVIVAYRVDRLTRSIRHLQQLVHWAEDHKKLVVSATEAHFDTTTPFAAVVIALMGTVA |
| | QMELEAIKERNRSAAHFNIRAGKYRGSLPPWGYLPTRVDGEWRLVPDPVQRERILEVYHRVVDNH |
| | EPLHLVAHDLNRRGVLSPKDYFAQLQGREPQGREWSATALKRSMISEAMLGYATLNGKTVRDDD |
| | GAPLVRAEPILTREQLEALRAELVKTSRAKPAVSTPSLLLRVLFCAVCGEPAYKFAGGGRKHPRYR |
| | CRSMGFPKHCGNGTVAMAEWDAFCEEQVLDLLGDAERLEKVWVAGSDSAVELAEVNAELVDLT |
| | SLIGSPAYRAGSPQREALDARIAALAARQEELEGLEARPSGWEWRETGQRFGDWWREQDTAAKNT |
| | WLRSMNVRLTFDVRGGLTRTIDFGDLQEYEQHLRLGSVVERLHTGMS |
| 3 | MKYAVYVRVSTDRDEQVSSVENQIDICRYWLEKNGYEWDPNAVYFDDGISGTAWLERHAMQLIL |
| | EKARRNELDTVVFKSIHRLARDLRDALEIKEILIGHGIRLVTIEENYDSLYEGGNDIKFEMFAMFAAQ |
| | LPKTISVSVSAAMQAKARRGEFIGKPGLGYDVIDKKLVINEKEAEIVREIFDLSYKGYGFKKIANILN |
| | DKGTYTKFGQLWSHTTVGKILKNQTYKGNLVLNSYKTVKVDGKKKRVYTPKERLTIIEDHYPTIVS |
| | KELWNAVNSDRASKKKTKQDTRNEFRGMMFCKHCGEPITAKYSGRYAKGSKKEWVYMKCSNYI |
| | RFNRCVNFDPAHYDDIREAIIYGLKQQEKELEIHFNPKMHQKRNDKSTEIKKQIKLLKVKKEKLIDL |
| | YVEGLIDKEMFSKRDLNFENEIKEQELALLKLTDQNKRNKEEKKIKEAFSMLDEEKDMHEVFKTLI |
| | KKITLSKDKYIDIEYTFSL |
| 4 | MNLMDENTPKNVGIYVRVSTEEQAKEGYSISAQKEKLKAYCISQGWDSYKFYIDEGKSAKDIHRPS |
| | LELMLRHIEQGIIDTVLVYRLDRLTRSVRDLYSLLDYFDKYQAVFRSATEVYDTGSATGRLFITLVA |
| | AMAQWERENLGERVKMGQVEKARQGQFSAPAPFGFTKEGESLVKNPEEGEVLLDMIDKIKKGYS |
| | LRELADYLDESDAIPKRGYKWHIASILVILKNPVLYGGFRWAGEILEGAFEGYISKKEFEQLQKMLH |
| | DRQNFKRRETSSIFIFQAKILCPNCGSRLTCERSIYFRKKDNKNVESNHYRCQACALNKKPAIGISEK |
| | KFEKALIEYMQNANFKREPKIPQEKQQDYDKLHQKIISIEKQRKKYQKAWSMELMTDQEFEQLMA |
| | ETKEALQKALAKLEQNDLHPIEKPLNIERAKELAKMFRENWSVLTGEEKRQTVQELIKHIEFEKKD |
| | NKARILDIHFY |
| 5 | MTISGGTDEALFYFRISLDATGERLGVERQEPPCLELCRSKGFTPGKAYIDNDLSATKEGVVRPEFE |
| | ALLRDLKLRPRPVIVWHTDRLVRVTKDLERVISTGVNVYAVHAGHFDLSTPAGRAVARTLTAWAQ |
| | YEGEQKALRQKEANLQRAQMGKPWWPRRPFGLEKDGELNEPEALSLRKAYADLLSGASLTDLAA |
| | DLNAAGHTTNKGGAWTSTSLRPVLMNARNAAIRTYDGEEIGPANWKAIVPEETWRAAVRLLSSPS |
| | RKTGGGGKRLHLMTGVAKCSVCDSDVKVEWRGKKGEPTAYTVYACRGKHCLSHRQKWVDDRV |
| | ETLVLERLSQEDAAAVWAVDNDTELADVREEVVTMRERLEAFAEDYADGAISRAQMQAGSARVR |
| | EKLEAAEAQMAYLAAGSPLGELIASNDVEKTWESLTLDRKRAVIEAMTRKVTLYPRGRGIRSHRPE |
| | DCQVEWVDERPRLSAVS |
| 6 | MAYAVYVRVSSDKDEQVSSVENQIDICRYWLENNGFEWDENAVYFDDGISGTAWLERHAIQLVLE |
| | KARKKEIDTVVFKSIHRLARDLKDALEIKEILLGHGVRLITIEEGYDSHYEGKNDMKFEMYAMFAS |
| | QLPKTLSVSITAALAAKVRRGGYTGGFVPYGYEIIDGKYAINEEEAALVREIFELYAQGFGYIKIANT |
| | INDKGARTRKGAPWTFSTLSKMIKNPAYKGTYIMQKYGTVKVNGRKKKVINPKEKWVIFEGHHPA |
| | IISHELWEKVNNKDPNKFKKKRRVSTTNELRGITVCAHCGTAMSKRNSINVSKNGRETEYSYMICN |
| | WSRITARRECVRHVPIHYKDLRALVLSKLKEKERELDKEFCSDENQLQVKLRKLKKDINDLKFKRE |
| | RLLDLYLEDERIDKDTFTIRNAKIEKEIGLKEMEIRKASNIEIQMKEKQEVRDAFALLEESKDLHSVF |
| | QKLIKRIEVAQDGAIDIYYRFEE |
| 7 | MWACSHLRADGTTPTSSSTLLTMSARDYDIEAEWTPADLALLKELEEAEALLPADAPRALLSVRLS |
| | VFTDDTTSPVRQELDLRQLAREKGHRVVGLASDLNVSATKVPPWKRKSLGDWLNNRAPEFDALLF |
| | WKIDRFIRNLNDLNVMIRWSETYSKNLISKNDPIDLTTTMGKMMVSLLGGVAEIEAANTKTRVESL |
| | WDYTKTQGEWHVGKPPFGYKTARDEAGKVVLVEDPLAVETLHTARELVMSGMSTTAAAKVLKE |
| | RGLISSTTATLTRRLRNPGVLGLRVEEDKDGGIRRSKLILGRDGQPIRIADPIFTEEQFEELQAVLDKR |
| | GKRQPHRQPGGATSFLGVLKCAVCETNMINHYTRNRHGDYAYLRCQGCKSGGYGAPNPQEVYDR |
| | LVEQVLAVLGDFPVEMREYARGEEKRKELKRLEESIAYYMKELEPGGRFTKTRFTQDQAEGTLDK |
| | LIAELEAIDPESAKDRWVYVAGGKTFREHWEEGGIDAMSADLIRAGIMCQVTRTKVPKVRAPQVH |
| | LKLMIPKDVRTRLVIRPDDFGQTF |
| 8 | MSKRAVIYTRVSRDDTGEGQSNQRQEAECRRLTDYRRLDVVAVEADISISASKGLERPAWLRVLG |
| | MIERGEVDYVIAYHMDRVTRSMTELEQLIEMCLKYDVGVATVSGDIDLTTDVGRMVARIIGAVAR |
| | AEVERKSARQKLANAQRAAEGKPHVSGIRPFGYADDHRQVVTIEAQAIRAAAEAALAGESMIGIAE |
| | SWSKDGLLSARARRGHDKGNRPTKAAWSARGVRNVLVNPRYAGIRFYNGERVGQGDWEPILDVE |
| | THLRLVEKLTDPTRRKGTVKTGRVAASLLTAIARCEVCGQTVRASSVRGRQTYACRNSHAHVDRS |
| | TADLMTQEWVISRLADPDTLAKLAPSGDDRVDEAKATIEKRREALKTYARLLATGAMDEDQFTEA |
| | SAVARSEMQEAEAVLTEAGTGDLLAGLDVGSDAVGPQFLALSLARQRGIVEALVDVTLRPASKAR |
| | KVVTPEHERVILADR |
| 9 | MKYAVYVRVSTDRDEQVSSIENQIDICRYWIEKNGYEWDENSIYKDEAVSGTAWLERRAMQLILG |
| | KARKKELDTVVFKSIHRLGRDLRDALEIKEILLGHGVRLVTIEEGYDSYYEGKNDLKFEMYAMFAS |
| | QLPKTLSVSISAALAAKVRRGEYTGGTVPYGYKIVDKKYVINQEEAEIVREMYELYDNGLGYLRIS |
| | NALNDVGKYKRSGKLWTYSAVKLIITNPMYKGDYVMGRSTEVKVDGRKKRIQEPREKWVVFENH |
| | HPAIIERPLWDKINNPKINKKIKRRVAVTNELRGIARCIHCGSPFVLHTYKYKNKEGEELNYGYLTC |
| | GTYKLTGGRGCVKHSGLRYERLRSLVLRKLKEKERDLEKVFKLNDKDKHQEKQKKLRKEKKELEI |
| | KRERLLDLYLDGGSIDKETFTKRDANFAKNIKEKELEILKLDDVKALIVEQQKVKDAFKLLEDSENL |
| | YPVFKKLIAGIDISQNGAVDIRYRFEE |
| 10 | MSNRLHEYDVEAEWSPADLALLRSLEEAESLLPESAPRALLSVRLSVFTEDTTSPVRQELDLRQLAR |
| | DKGMRVVGVASDLNVSATKVPPWKRKSLGTWLNDRVPEFDALLFWKVDRFIRNMSDLSRMIDWS |
| | NRYEKNLISKNDPIDLSTPLGKMMVTLLGGIAEIEAANTKARVESLWDYNKTQSEWLVGKPPYGYT |
| | TARDEQGKNRLVIDPKASEALHLTRLHLLEGGSVRSFVPVLKEKGLVSTGLTPSTLIRRLRNPALLG |
| | YRVEEDKKGGLRRSKVVVGHDGQPIVIADPIFTREEWDTLQAAMDARNKNQPPRQPSGATKFRGV |
| | LKCVECGTNMIVHHTRNKHGEYAYLRCQGCQSGGLGSPHPQDVYDALVGQVLTVLGDWPVQTRE |
| | YARGAEARAETKRLEETIAVYMKGLEPGGRYTKTRFTMEQAEATLDKLIAELEAIDPDTTTDRWV |
| | YVAGGKTFREHWEEGGMDAMTSDLLRAGITATVTRTKIPKVRAPKVELDLDIPKDVRERLIVREDD |
| | FAETF |
| 11 | MNYERSYLRSCQVSTLEQKEHGYSIEEQERKLKSFCEINDWSISDVFIDAGFSGAKRDRPELQRMM |
| | KDIKRFDLVLVYKLDRLTRNVRDLLDLLEIFEQNNVAFRSATEVYDTSTAMGRLFVTLVGAMAEW |
| | ERETIRERVMMGKRAAIKQGMILTPPPFYYDRVDNTYIPNDYKKVVLWAYDEVLKGVSSKGIARK |
| | LNDSDIPPPNGKRWEDRTITRALRSPITRGHYTWGDVFIENSHEPIITEEMYQQIKERLEERINTKIVS |
| | HVSVFRGKFICPRCGGTLTMNTATRKRKKGYVTYKTYYCNTCKGKKESFGFAENEALRVFRDYLS |
| | KLDLDKYEVKTKQKDDVVTIDIDKVMEQRKRYHKLYAKGLMQEEELFELIKETDETIAEYEKQKE |
| | LVPRKTLDVDKIKKFKNVLLESWKIFSSEDKADFIKMAIKSIDIEYVKFKNRHSIKINDIEFY |
| 12 | MNRGGPTVRADIYVRISLDRTGEELGVERQEESCRELCKSLGMEVGQVWVDNDLSATKKNVVRP |
| | DFEAMIASNPQAIVCWHTDRLIRVTRDLERVIDLGVNVHAVMAGHLDLSTPAGRAVARTVTAWAT |
| | YEGEQKAERQKLANIQNARAGKPYTPGIRPFGYGDDHMTIVTAEADAIRDGAKMILDGWSLSAVA |
| | RYWEELKLQSPRSMAAGGKGWSLRGVKKVLTSPRYVGRSSYLGEVVGDAQWPPILDPDVYYGVV |
| | AILNNPDRFSGGPRTGRTPGTLLAGIALCGECGKTVSGRGYRGVLVYGCKDTHTRTPRSIADGRASS |
| | STLARLMFPDFLPGLLASGQAEDGQSAASKHSEAQTLRERLDGLATAYAEGAISLSQMTAGSEALR |
| | KKLEVIEADLVGSAGIPPFDPVAGVAGLISGWPTTPLPTRRAWVDFCLVVTLNTQKGRHASSMTVD |
| | DHVTIEWRDVAE |
| 13 | MKVAVYCRVSTLEQKEHGHSIEEQERKLKSFCDINDWTVYDTYIDAGYSGAKRDRPELQRLMNDI |
| | NKFDLVLVYKLDRLTRNVRDLLDLLEIFEKNDVSFRSATEVYDTTTAMGRLFVTLVGAMAEWERE |
| | TIRERTQMGKLAALRKGIMLTTPPFYYDRVDNKFVPNKYKDVILWAYDEAMKGQSAKAIARKLN |
| | NSDIPPPNNTQWQGRTITHALRNPFTRGHFDWGGVHIENNHEPIITDEMYEKVKDRLNERVNTKKV |
| | RHTSIFRGKLVCPVCNARLTLNSHKKKSNSGYIFVKQYYCNNCKVTPNLKPVYIKEKEVIKVFYNY |
| | LKRFDLEKYEVTQKQNEPEITIDINKVMEQRKRYHKLYASGLMQEDELFDLIKETDQTIAEYEKQN |
| | ENREVKQYDIEDIKQYKDLLLEMWDISSDEDKEDFIKMAIKNIYFEYIIGTGNTSRKRNSLKITSIEFY |
| 14 | MPGMTTETGPDPAGLIDLFCRKSKAVKSRANGAGQRRKQEISIAAQETLGRKVAALLGMQVRHV |
| | WKEVGSASRFRKGKARDDQSKALKALESGEVGALWCYRLDRWDRGGAGAILKIIEPEDGMPRRL |
| | LFGWDEDTGRPVLDSTNKRDRGELIRRAEEAREEAEKLSERVRDTKAHQRENGEWVNARAPYGLR |
| | VVLVTVSDEEGDEYDERKLAADDEDAGGPDGLTKAEAARLVFTLPVTDRLSYAGTAHAMNTREIP |
| | SPTGGPWIAVTVRDMIQNPAYAGWQTTGRQDGKQRRLTFYNGEGKRVSVMHGPPLVTDEEQEAA |
| | KAAVKGEDGVGVPLDGSDHDTRRKHLLSGRMRCPGCGGSCSYSGNGYRCWRSSVKGGCPAPTYV |
| | ARKSVEEYVAFRWAAKLAASEPDDPFVIAVADRWAALTHPQASEDEKYAKAAVREAEKNLGRLL |
| | RDRQNGVYDGPAEQFFAPAYQEALSTLQAAKDAVSESSASAAVDVSWIVDSSDYEELWLRATPTM |
| | RNAIIDTCIDEIWVAKGQRGRPFDGDERVKIKWAART |
| 15 | MKVAIYTRVSTLEQKEKGHSIEEQERKLRAYSDINDWKIHKVYTDAGYSGAKKDRPALQEMLNEI |
| | DNFDLVLVYKLDRLTRSVKDLLEILELFENKNVLFRSATEVYDTTSAMGRLFVTLVGAMAEWERT |
| | TIQERTAMGRRASARKGLAKTVPPFYYDRVNDKFVPNEYKKVLRFAVEEAKKGTSLREITIKLNNS |
| | KYKAPLGKNWHRSVIGNALTSPVARGHLVFGDIFVENTHEAIISEEEYEEIKLRISEKTNSTIVKHNAI |
| | FRSKLLCPNCNQKLTLNTVKHTPKNKEVWYSKLYFCSNCKNTKNKNACNIDEGEVLKQFYNYLK |
| | QFDLTSYKIENQPKEIEDVGIDIEKLRKERARCQTLFIEGMMDKDEAFPIISRIDKEIHEYEKRKDNDK |
| | GKTFNYEKIKNFKYSLLNGWELMEDELKTEFIKMAIKNIHFEYVKGIKGKRQNSLKITGIEFY |
| 16 | MQLDATLTLRDEGLSAFHQRHIKQGALGVFLRAIEDGRIQPGSVLIVEGLDRLSRAEPIQAQAQLAQ |
| | IINAGITVVTASDGREYNRERLKAQPMDLVYSLLVMIRAHEESDTKSKRVKAAIRRQCEGWVAGT |
| | WRGIIRNGKDPHWVRLGEHGKFEHVPERVLAVRTMIDLFLEGHGAIEITRRLTEQNLYVSNAGNYS |
| | VHMYRIVRNQALIGEKRISVDGEEFRLDGYYPPILTREEFAELQQTMSERGRRKGKGEIPNIITGLSIT |
| | VCGYCGRAMTTQNSKARAPKGKSVVRRLSCPMNSFNEGCPIGGSCESEIVERALMRYCSDQFNLSR |
| | LLEGDDGTARRTAQLAVARQRASDIEAQIQRVTDALLSDDGKAPAAFTRRARELETQLEEQRREIE |
| | ALEHQIAASSAHGIPAAAEAWAQLVDGVLALDYDARMKARQLVADTFRKIVVYQRGFAPIDDAA |
| | ADRWKRSGTIGLMLVTKRGGMRLLNVDRRTGCWQAEDDLDPSLIPSDGLPMLPLDA |
| 17 | MKAAIYIRVSTQEQIENYSIQAQTEKLTALCRSKDWDVYDIFIDGGYSGSNMNRPALNEMLSKLHEI |
| | DAVVVYRLDRLSRSQRDTITLIEEYFLKNNVEFVSLSETLDTSSPFGRAMIGILSVFAQLERETIRDR |
| | MVMGKIKRIEAGLPLTTAKGRTFGYDVIDTKLYINEEEAKQLQMIYDIFEEEKSITSLQKRLKKLGF |
| | KVKSYSSYNNWLTNDLYCGYVSYADKVHTKGVHEPIISEEQFYRVQEIFSRMGKNPNMNRDSASL |
| | LNNLVVCSKCGLGFVHRRKDTVSRGKKYHYRYYSCKTYKHTHELEKCGNKIWRADKLEELIIDRV |
| | NNYSFASRNVDKEDELDNLNEKLKTEHTKKKRLFDLYISGSYEVSELDAMMADIDAQINYYEAQIE |
| | ANEELKKNKKIQENLADLATVDFDSLEFREKQLYLKSLINKIYIDGEQVTIEWL |
| 18 | MGKSITVIPAKKVQTSVLHQDRKKIKVAAYCRVSTDQEEQLSSYENQVNYYREFISKHEDYELVDI |
| | YADEGISATNTKKRDAFNRLIQDCRAGKVDRILVKSISRFARNTLDCIKYVRELKELGVGVTFEKEN |
| | IDSLDSKGEVLLTILSSLAQDESRSISENATWGIRKKFERGEVRVNTTKFMGYDKDENGRLIINPQQA |
| | ETVKFIYEKFLEGYSPESIAKYLNDNEIPGWTGKANWYPSAIQKMLQNEKYKGDALLQKTFTVDFL |
| | TKKRVQNDGQVNQYYVENSHEAIIDEETWETVQLEMARRKTYRDEHQLKSYIMQSEDNPFTTKVF |
| | CGACGSAFGRKNWATSRGKRKVWQCNNRYRIKGVEGCYSSHLDEATLEQIFLKALELLSENIDLL |
| | DGKWEKILAENRLLDKHYSMALSDLLRQEQIDFNPSDMCRVLDHIRIGLDGEITVCLLEGTEVDL |
| 19 | MPIAPEFLSLAYPGQEFPAYLYGRASRDPKRKGRSVQSQLDEGRATCLDAGWPIAGEFKDVDRSAS |
| | AYARRTRDEFEEMIAGIQAGECRILVAFEASRYYRDLEAYVRLRRVCREAGVLLCYNGQVYDLSK |
| | SADRKATAQDAVNAEGEADDIRERNLRTTRLNAKRGGAHGPVPDGYKRRYDPDSGDLVDQIPHP |
| | DRAGLITEIFRRAAAAEPLAAICRDLNERGETTHRGKAWQRHHLHAILRNPAYIGHRRHLGVDTGK |
| | GMWAPICDDEDFAETFQAVQEILSLPGRQLSPGPEAQHLQTGIALCGEHPDEPPLRSVTVRGRTNYN |
| | CSTRYDVAMREDRMDAFVEESVITWLASDEAVAAFEDNTDDERTRKARIRLKVLEEQLEAAQKQA |
| | RTLRPDGMGMLLSIDSLAGLEAELTPQIDKARQESRSLHVPALLRDLLGKPRADVDRAWNEALTLP |
| | QRRMILRMVVTIRLFKAGSRGVRAIEPGRITLSYVGEPGFKPVGGNRAKQ |
| 20 | MDRNKVAIYVRVSTQGQVDDGYSLDEQVDLLTNYCKLKEWTLYDVYVDPGISGKNMHRPEIERL |
| | TRDAKRKLFDIVLIYDLKRLGRSQKENIVLVEDVFNPNGIRLVSFTENFDASTPVGKMVFGMLSAY |
| | AELDRANIAERMMMGKIGRAKAGKAMSWGMPPFAYDYNKETGDLELDEVKAPIVEMIYSEFLKG |
| | ASVNKIVQKLNSMSYHGKNHEWKHHAVTVIIDNPVYCGMMKYMGQTYQAKHTPIIDKKTFELAQ |
| | LERKKRLSKYHDADWLGPFQRKYIGSKICYCGLCGAHLKSEKDKKNKLTGIRSISFFCPNTRSRGTG |
| | ECTNPRFKQSVLEGYILNEVAKLQQNPEKLKDIKPAEDNELHNKIATYEKKIKQNSSKLSKLNDLYL |
| | NDLISLDDLKQQSKSLLNENEFMEEQIKLLSATTREDELRKKIDTFLAFPDILTADYDTQKQAVELVI |
| | SRVEATKEGIDIFFNF |
| 21 | MINVVGYARYSSDNQREESIVAQERAIREFCQKNNYNLIKVYKDEAISGTSIKDRTEFLELIEDSKKK |
| | EFQCVVVHKFDRFARNRYDHAIYEKKLNDNGVKLLSVLEQLNDSPESVILKSVLTGMNEYYSLNLS |
| | REVKKGLNENALNCIHNGGIPPLGYNLDEDRRYIINEIEAETVRIIYKLYIEGIGYASIAEQLNQMGRL |
| | NKLGKPFRKTSIRDILLNEKYTGVFVYGKKDGHGKLTGNEVKIEGGIPQIISKEDFEKIQIKMKNRKT |
| | GSRATAHETYYLTGVCTCGECGGRYSGGYRSRQRDGSITYGYTCINRKTKVNDCRNKPIRKEILEE |
| | FVFKTIKKKYLQKRG |
| 22 | MKKITKIDELPQGQLPNTNLRVAAYARVSTDSDEQLESLKAQREHYERYIKSNPEWEFAGLYYDEG |
| | ISGTKMEKRTELLRMIRNCKQGRIDFIITKSISRFARNTVDCLELVRKLIDIGVYIYFEKENLNTGDME |
| | SELMLSILSGFAAEESASISQNSTWSIQKRFQNGSYVGTPPYGYTNTDGEMVIVPEEAEIIKRIFTECL |
| | SGKGGGTIARGLNKDKIPARRGNHWSAGTVIDMLRNEKYMGDVLLQKTYTDSNYNRHPNTGEKD |
| | QYYYKDSHEAIISREDFAKAQDLIDERAKMKCKGVKKNVYLNRYALSGKIVCGECGRNFRRKTNY |
| | SAGRSYIAWSCIGHIEDKESCSMLFLRDGEIKATFTTMMNKLAFSNKLILEPLFKSISQIDEESDRER |
| | MDAIDKRMEQLMEERNTLITLMAKGFLEPALFNQERNVLDSEIKNLTTEKTNLVTNSTSGVLRAND |
| | IKDLIDYVSADNFNGDYTEELFEEFVENIIVNSRDELTFNLKCGLSLKEKVVR |
| 23 | MKVIQKIEPTKPKIAKRKRVAAYARVSVDKGRTMHSLSAQVSYYSKLIQKNPDWEYVGVYSDGGI |
| | SGRTTESRNEFKRLIKDCKDGKVDIILTKSISRFARNTVDLLETVRDLRAINVEVRFEKENIHSLSGD |
| | GELMLSILASFAQEESRSISNNIKWSIQKRFKEGKHNGRFNIYGYRWVGQELIVEPSEAENIKLMYA |
| | NYMNGLSAEFTAKQLTKMGVTAMKGGPFKATSVRQILKNITYTGNLLLQKEYTPDPITGKSRYNN |
| | GEMPQYFVENHHEAIIPMEEWQAVQDERLKRRKLGAHANKSINTTCFTSKIKCGNCGKNFRRSGK |
| | RQGKNKELYHIWTCRNKSEKGVKVCNARNIPEPALKKYATEVLGLEVFDEQIFIDSIEEIVASEGNM |
| | LQFKFYGGREVEVKWTSTARKDYWTPEVRRAWSERNKRKESRTWNGRTTEFTGFVVCGRCGAN |
| | YRRQAVTSKTDGTVRRKWHCSNSAVACNEGKSRNCIYEEDLKVMVAEILGIPTFNEPTMDEKLSRI |
| | SIIDTEVTFHFKDGHDEVRTFEIPKKKARTFSEEERARRRLVMKKRWEEKKRDEESNNDTSDNH |
| 24 | MDKKAAIYIRVSTQEQATEGYSIQAQTDRLTKYVEAKDFILYKKYIDAGYSASKLERPAMQELIQD |
| | VQSKKVDVVIVYKLDRLSRSQKDTMYLIEDIFRPNDVELISMQESFDTSTAFGSATVGMLSVFAQLE |
| | RKSISERMITGRVERAKKGFYHTGGQDRPPAGYQFNSDNQLIINEYEAAAIKDLFRLYNDGLGKSSI |
| | SEYLKKNYPGKNKWLPSSIDRMLKNSLYIGKVKFSGAEYDGIHEPIIDEVTFYKTQKEIARRKQTNT |
| | KRYNYVALLGGLCECGICGAKMANRRAVGRKGKVYRYYRCYSKKGSPKHMMKTDGCSSKAQQ |
| | QFIIDEAVINNLKNIDVEAELKRRSAPQTNTSLISSQIESIDKQINKLIDLFQVDSMPLDVISEKIDKLN |
| | KEKQSMEKLLERKNKLDKTELQHRFDVLKSFDWDNSSIESKRVVIEMLVQKVIIHDNSIEIILVE |
| 25 | MTTGIYIRVSTEEQAKEGYSIANQKEKLIAFCESQGWSSYKIYSDEGYSAKDMKRPALQEMFNDMT |
| | QGVIKIILVYKLDRLTRSVRDLYTMLETFDKHDCKFKSATEVYDTTTAMGRLFITLVAALAQWERE |
| | NTAERVRVVMENNVKNGKWKGGTLAYGYQLKNGNIVINEDEAATVSFIFNKIKFTGPLAIVRELIK |
| | KNIPTRTGSDWHVDTIRGIITNPFYIGYQRFNDSLKQYKGSVKQQKLYKSSHESIISEDEFWEVQEIL |
| | NARKTHGSKKSTSTYYFSTVLTCGVCGASMCGHLSGNKKTYRCNKKKTSGNCDSSLILESTIVNWL |
| | LTNLESISKMLINNTITNTKGTITKEKHVNDFQKELKKITKLKEKHKTMYENDIIDIAELIEQTNKYR |
| | HREKEIKEIIHNIDKQDEKNEILKATLYNFNDAWAAATEPERKFLINSIFQNISIHAIGVHTRTKPRDIV |
| | ISSIY |
| 26 | MDKIKRVALYIRVSTEEQVLHGDSIRTQTEALEQYSKDNNFIIVDKYIDEGYSATNLKRPNLKRMIE |
| | DVKNNKIDLVMITKIDRLSRGVKNYYKIMETLEKHKCDWKTILEDYDSSTAAGRLHINIMLSVAEN |
| | EAAQTSERIKFVFQDKLKRGEVITGSVPFGYKIKDKHLVIKEDEASIVREAFDAYQDFSSLAKTIQHI |
| | NTKFSTKYMFKWMPKMLKNKIYIGIYEKGDLVVENYCEPIISREQFNFVQTLLKKNIRFSENKFKM |
| | NYLFSGMIVCGSCGRKMGGVHSRGGANRHYLYYRCPLSFATKLCDNKPYLNEKKVEAFLLENVK |
| | KELQKTILEHESNNKKRQKKNNNKNLRNKLEKQIEKLQDLYFDDLINKDTYKFKYKKLNDDLSEL |
| | NKAENEAESVEKDLKSMKIFLDTNFEDNYYDMNYSEKRTLWTSAIDRIEVQKNGELVIKFL |
| 27 | MSTDQEEQLSSYENQVNYYRDYISKHEDYELVDIYADEGISATNTKKRDAFNRLIQDCRAGKVDRI |
| | LVKSISRFARNTLDCIKYVRELKELGVGVTFEKENIDSLDSKGEVLLTILSSLAQDESRSISENATWGI |
| | RKKFERGEVRVNTTKFMGYDKDENGRLIINPGQAETVKFIYEKFLEGYSPESIAKYLNDNEIPGWTG |
| | KANWYPSAIQKMLQNEKYKGDALLQKTFTVDFLTKKRVQNDGQVNQYYVENSHEAIIDKDTWEL |
| | VQLELARRKDFREEHQLKAYIIQNDDNPFTTKVFCKACGSAFGRKNWTTSRGKRKVWQCNNRYR |
| | VKGQIGCQNNHIDEETLEKAVVMAVELLSENVDLLHGKWNKILEENRPLEKHYCTKLAEMINKPL |
| | WEFDSYEMCQVLDSITISEDGQISAKFLEGTEVDL |
| 28 | MKVPVWCYARISTLKQIDGFGIQRQINTINQFLQCVELDHRLPFTLDVDNVTQMVAEGKSAFRDKN |
| | WNEKTKLGQYRKLVMDGVISDSVLIVENIDRLTRLDPYMAIEIISGLVNRGTTILEIETGMTYSRYIP |
| | ESITVLVMQCNRANGESKRKSIMMQKSHANRYGKVSKVRPRWFDVVEIDGIKQYRPNETAKAIQR |
| | MYNDYINGIGAAHIVRTYGNTDNGKAWTLVTVLRALSDKRVADDARYPPIIDKKLYDSVQALKAA |
| | TNKKGNTHQKNMLNIFSGMSRCPVCNQSIIVKRNSHGNLFTVCLGKRTNKTCEARSISYFALERPLL |
| | TAIRDLDFSEVYKHEDKNVLTLRDQWIQNERDIAAFRERLSKASRYEKFVILDELETMNREQEELTI |
| | RLKSVDVPKDIQLTFDDDKLDLDTNYRIELNNRIKKLIQYINIVREDVTKSSYTIYCTIKYWTDVISH |
| | LVIIDVNIKRTGTGGTNTLTTTLRSVSSLNMDGTVSGNPDSDAWEYWKSFLDGTIGLVDYKK |
| 29 | MKKVFVYHRVSSDQQLDGSGIARQAELLEGYLERTGICAEMDDPAPVVLSDQGVSAFKGLNISEGE |
| | LGAWMEQVRNGMWDSSILVVESIDRFSRQNPFDVMGYINALMAHNVAIHDVMANIVISRSNSKDL |
| | PFVMMNAQQAYDESKYKSDRIRKGWAKKREQAFNKGTIVTNKRPQWIEVENDKYVLNHKAAVV |
| | KEIFALYQTGMGCPTIAKQLQTKEGEQYKFNRPWTGELVHKILTNRRVTGKIFISEIIRNHDDIENPV |
| | TQKKYDMDVYPVVINEEEFELVQELLKSRRPNAGRVTVKKDGQEEVLIKSNLFSGIARCTECGGPM |
| | YHNVVRAKRTPKKGDPKIEEYRYIRCLNERDGLCENKAMTYETVERFVVEHLLGMDLNTVIKEQE |
| | FNPEIEVIRIQIDQVKDHITNYENGIERRKSAGKAVSFEMREELDDAKLELEQLLARQASLATVQVD |
| | LPVLQDVNVTELYNVNNVDIRTRYENELNKIVSNIRLKRNGNFYTIDIIYKQNELKRHVLFIENKKK |
| | EQKLISEVIIENVDGAKFYYTPSFVISVKDGEIRFQQTKEDLTIIDYSLLLNYVDAVDRCDAVGVWM |
| | RNNMSFLFTK |
| 30 | MKVALYVRVSTLEQAEEGYSINEQKDKLKKYCEIKDWTIVKEYVDPGRSGSNINRPSMQQLIKDAD |
| | TGLYDAVLVYKLDRLSRSQKDTLYLIEDVFQKNNIHFISLSENFDTSTAFGKAMIGILSVFAQLEREQ |
| | IKERMSMGRIGRAKSGKIMEFNNPAFGYEIDGDNYKVDPLRAEIVKRIYKMYLSGTSINKIKETLNS |
| | EGHIGNKKNWSDTRIRYILSNPTYLGKIRYDGKTYDGKFSPIIDEETFNKTQNELKERQTATYKRFN |
| | MKLRPFQSKYMLSGLLRCGYCGATLFVNSYVYNGKRKLRYNCPSTYKSKQKTRTYKIMDPNCPFK |
| | LVYAKDLEPAVINEIKNLALNPQSIQKPVKKTPDIDVEAIQKELAKVRKQQQRLIDLYVISDDVNIDN |
| | ISKKSADLKLQEETLKKQLAPLEDPDDDDKIVAFNEILDQIKDIDSLDYDKQKFIVKKLIKKIDVWN |
| | DNKIKIHWNI |
| 31 | MNKVAIYVRVSTKGQAEEGYSIDEQIAMLTSYCSIHKWTVFDTYVDAGISGATIERPELSRLSRDAQ |
| | KKKFNTMIVYDLKRLGRSQRNNIAFIEDVLEKNGIGFISLTENFDTSTPLGKAMVGILSAFGQLDRD |
| | TIRERMMMGKIGRAKSGKPMMTSTIAFGYTYDKSTSTLNINPVEAIIVKTIFNEYLSGMSLTKLRDY |
| | LNKNDLLRNGRPWNYQGVSRLLRNPVYMGMIRFSGKVYQGNHEPIIDAETFETTQKELKRRQIAT |
| | YEFNKNTRPFRAKYMLSGIIRCACCGAPLHLVLRNKRKDGTRNMHYQCVNRFPRTTKGITVYNDG |
| | KKCNTEFYDKTNLEIYVLGQVRLLQLNKSKLDKMFETPVIINTEEIENQINSLNNKMRRLNDLYLND |
| | MVTLADLKAQTHTFLKQKELLENELENNPAIRQEEDRKKFKKLLGTKDITQLSYEEQTFTVKNLID |
| | KVFVKPSSIDIHWKI |
| 32 | MATKARVYSYLRFSDPKQAAGSSAARQLEYAKRWAAEHGMALDAALSMQDEGLSAYHQRHVTK |
| | GALGVFLAAIDEGRIPAGSVLIVEGLDRLSRAEPIQAQAQLAQIINAGITVVTASDGREYNRAGLKA |
| | QPMDLVYSLLVMIRAHEESDTKSKRVRAAIHRQCKGWKDGTWRGVIRNGKDPSWTRLDPETKAF |
| | QLVPERAEAVKLAIRMFRDGHGAVRIMRTLAEEGLQLTNGGNPAGQLYRILRNRALIGEKVLEIDG |
| | EEYRLAGYYPSLLSAEQFADLQQATEQRAKQKGTGEIPGLITGLRISYCGYCGSAMVAQNLMNRG |
| | RREDGGPQHGHRRLICVGNSQGMGCAVAGSCSVVPIEHAIMSYCADQMNLARLFEGGDRSEALAG |
| | KLAIARARVADTTAKVERITDAMLADDAGDAPAAFMRRARELEASLVEQQAEVDALEHELAAIAS |
| | SPTPAVAKAWADVQEGVKALDYNARTKARQLVADTFERISIYHRGTEPEQTRSWKGTIDLVLVAK |
| | RGSARILHVDRQTGEWRGGEEVRDLPDDPIQ |
| 33 | MKYAVYVRVSTDRDEQVSSVENQIDICRYWLEKNGYEWDPNAVYFDDGISGTAWLERHAMQLIL |
| | EKARRNELDTVVFKSIHRLARDLRDALEIKEILIGHGIRLVTIEENYDSLYEGGNDIKFEMFAMFAAQ |
| | LPKTLSVSISAAMQAKARRGEVIGKPGLGYDVIDKRLVINEKEAEVVREIFDLSKKGFGYKKIASILN |
| | DKGIYTKSGQLWSDTTIAKVLKNQKYKGDLVLNRYKTVKVDGRKKRIYTPKDRLTIIEDHYPAIVS |
| | KELWNEVNNNRVSQKKVKQNMRNEFRGMIFCNHCGGSITVKYSGKCSKKNKKEWVYLKCSNFL |
| | RFNQCVNFNPIYYDEIREMYRLKQKEKELEIHFNPKIHEKREAKSIEIKKDIKLLKAKKEKLIDLYVE |
| | GLIDKDVFSKRDLNIALNEIKEQELELLKLMDQNKRVNEEQQIKKAFSMLDEEKDMHEVFKILIKKIT |
| | LSKDKYVEIEYTFSL |
| 34 | MDTYAGAYDRQSRERENSSAASPATQRSANEDKAADLQREVERDGGRFRFVGHFSEAPGTSAFGT |
| | AERPEFERILNECRAGRLNMIIVYDVSRFSRLKVMDAIPIVSELLALGVTIVSTQEGVFRQGNVMDLI |
| | HLIMRLDASHKESSLKSAKILDTKNLQRELGGYVGGKAPYGFELVSETKEITRNGRMVNVVINKLA |
| | HSTTPLTGPFEFEPDVIRWWWREIKTHKHLPFKPGSQAAIHPGSITGLCKRMDADAVPTRGETIGKK |
| | TASSAWDPATVMRILRDPRIAGFAAEVIYKKKPDGTPTTKIEGYRIQRDPITLRPVELDCGPIIEPAE |
| | WYELQAWLDGRGRGKGLSRGQAILSAMDKLYCECGAVMTSKRGEESIKDSYRCRRRKVVDPSAP |
| | GQHEGTCNVSMAALDKFVAERIFNKIRHAEGDEETLALLWEAARRFGKLTEAPEKSGERANLVAE |
| | RADALNALEELYEDRAAGAYDGPVGRKHFRKQQAALTLRQQGAEERLAELEAAEAPKLPLDQWF |
| | PEDADADPTGPKSWWGRASVDDKRVFVGLFVDKIVVTKSTTGRGQGTPIEKRASITWAKPPTDDD |
| | EDDAQDGTEDVAA |
| 35 | MTKKVAIYTRVSTTNQAEEGFSIDEQIDRLTKYAEAMGWQVSDTYTDAGFSGAKLERPAMQRLIN |
| | DIENKAFDTVLVYKLDRLSRSVRDTLYLVKDVFTKNKIDFISLNESIDTSSAMGSLFLTILSAINEFER |
| | ENIKERMTMGKLGRAKSGKSMMWTKTAFGYYHNRKTGILEIVPLQATIVEQIFTDYLSGISLTKLR |
| | DKLNESGHIGKDIPWSYRTLRQTLDNPVYCGYIKFKDSLFEGMHKPIIPYETYLKVQKELEERQQQT |
| | YERNNNPRPFQAKYMLSGMARCGYCGAPLKIVLGHKRKDGSRTMKYHCANRFPRKTKGITVYND |
| | NKKCDSGTYDLSNLENTVIDNLIGFQENNDSLLKIINGNNQPILDTSSFKKQISQIDKKIQKNSDLYLN |
| | DFITMDELKDRTDSLQAEKKLLKAKISENKFNDSTDVFELVKTQLGSIPINELSYDNKKKIVNNLVS |
| | KVDVTADNVDIIFKFQLA |
| 36 | MRKVAIYSRVSTINQAEEGYSIQGQIEALTKYCEAMEWKIYKNYSDAGFSGGKLERPAITELIEDGK |
| | NNKFDTILVYKLDRLSRNVKDTLYLVKDVFTANNIHFVSLKENIDTSSAMGNLFLTLLSAIAEFERE |
| | QIKERMQFGVMNRAKSGKTTAWKTPPYGYRYNKDEKTLSVNELEAANVRQMFDMIISGCSIMSIT |
| | NYARDNFVGNTWTHVKVKRILENETYKGLVKYREQTFSGDHQAIIDEKTYNKAQIALAHRTDTKT |
| | NTRPFQGKYMLSHIAKCGYCGAPLKVCTGRAKNDGTRRQTYVCVNKTESLARRSVNNYNNQKIC |
| | NTGRYEKKHIEKYVIDVLYKLQHDKEYLKKIKKDDNIIDITPLKKEIEIIDKKINRLNDLYINDLIDLP |
| | KLKKDIEELNHLKDDYNKAIKLNYLDKKNEDSLGMLMDNLDIRKSSYDVQSRIVKQLIDRVEVTM |
| | DNIDIIFKF |
| 37 | MRKVAIYSRVSTINQAEEGYSIQGQIEALTKYCEAMEWKIYKNYSDAGFSGGKLERPAITELIEDGK |
| | NNKFDTILVYKLDRLSRNVKDTLYLVKDVFTANNIHFVSLKENIDTSSAMGNLFLTLLSAIAEFERE |
| | QIKERMQFGVMNRAKSGKTTAWKTPPYGYRYNKDEKTLSVNELEAANVRQMFDMIISGCSIMSIT |
| | NYARDNFVGNTWTHVKVKRILENETYKGLVKYREQTFSGDHQAIIDEKTYNKAQIALAHRTDTKT |
| | NTRPFQGKYMLSHIAKCGYCGAPLKVCTGRAKNDGTRRQTYVCVNKTESLARRSVNNYNNQKIC |
| | NTGRYEKKHIEKYVIDVLYKLQHDKEYLKKIKKDDNIIDITPLKKEIEIIDKKINRLNDLYINDLIDLP |
| | KLKKDIEELNHLKDDYNKAIKLNYLDKKNEDSLGMLMDNLDIRKSSYDVQSRIVKQLIDRVEVTM |
| | DNIDIIFKF |
| 38 | MKKAIAYMRFSSPGQMSGDSLNRQRRLIAEWLKVNSDYYLDTITYEDLGLSAFKGKHAQSGAFSE |
| | FLDAIEHGYILPGTTLLVESLDRLSREKVGEAIERLKLILNHGIDVITLCDNTVYNIDSLNEPYSLIKAI |
| | LIAQRANEESEIKSSRVKLSWKKKRQDALESGTIMTASCPRWLSLDDKRTAFVPDPDRVKTIELIFK |
| | LRMERRSLNAIAKYLNDHAVKNFSGKESAWGPSVIEKLLANKALIGICVPSYRARGKGISEIAGYYP |
| | RVISDDLFYAVQEIRLAPFGISNSSKNPMLINLLRTVMKCEACGNTMIVHAVSGSLHGYYVCPMRR |
| | LHRCDRPSIKRDLVDYNIINELLFNCSKIQPVENKKDANETLELKIIELQMKINNLIVALSVAPEVTAI |
| | AEKIRLLDKELRRASVSLKTLKSKGVNSFSDFYAIDLTSKNGRELCRTLAYKTFEKIIINTDNKTCDI |
| | YFMNGIVFKHYPLMKVISAQQAISALKYMVDGEIYF |
| 39 | MKAAIYIRVSTQEQVENYSIQAQTEKLTALCRSKDWDVYDIFIDGGYSGSNMNRPALNEMLSKLHE |
| | IDAVVVYRLDRLSRSQRDTITLIEEYFLKNNVEFVSLSETLDTSSPFGRAMIGILSVFAQLERETIRDR |
| | MVMGKIKRIEAGLPLTTAKGRTFGYDVIDTKLYINEEEAKQLQLIYDIFEEEQSITFLQKRLKKLGFK |
| | VRTYNRYNNWLTNDLYCGYVSYKDKVHVKGIHEPIISEEQFYRVQEIFTRMGKNPNMNRDSASLL |
| | NNLVVCSKCGLGFVHRRKDTMSRGKKYHYRYYSCKTYKHTHELEKCGNKIWRADKLEELIINRV |
| | NNYSFASRNVDKEDELDSLNEKLKIEHAKKKRLFDLYINGSYEVSELDSMMNDIDAQINYYESQIE |
| | ANEELKKNKKIQENLADLATVDFDSLEFREKQLYLKSLINKIYIDGEQVTIEWL |
| 40 | MTVGIYIRVSTEEQVKEGFSISAQKEKLKAYCTAQGWEDFKFYVDEGKSAKDMHRPLLQEMISHIK |
| | KGLIDTVLVYKLDRLTRSVVDLHNLLSIFDEFNCAFKSATEVYDTSSAMGRFFITIISSVAQFERENT |
| | SERVSFGMAEKVRQGEYIPLAPFGYTKGTDGKLIVNKIEKEIFLQVVEMVSTGYSLRQTCEYLTNIG |
| | LKTRRSNDVWKVSTLIWMLKNPAVYGAIKWNNEIYENTHEPLIDKATFNKVAKILSIRSKSTTSRRG |
| | HVHHIFKNRLICPACGKRLSGLRTKYINKNKETFYNNNYRCATCKEHRRPAVQISEQKIEKAFIDYIS |
| | NYTLNKANISSKKLDNNLRKQEMIQKEIISLQRKREKFQKAWAADLMNDDEFSKLMIDTKMEIDA |
| | AEDRKKEYDVSLFVSPEDIAKRNNILRELKINWTSLSPTEKTDFISMFIEGIEYVKDDENKAVITKISF |
| | L |
| 41 | MSPFIAPDVPEHLLDTVRVFLYARQSKGRSDGSDVSTEAQLAAGRALVASRNAQGGARWVVAGEF |
| | VDVGRSGWDPNVTRADFERMMGEVRAGEGDVVVVNELSRLTRKGAHDALEIDNELKKHGVRFM |
| | SVLEPFLDTSTPIGVAIFALIAALAKQDSDLKAERLKGAKDEIAALGGVHSSSAPFGMRAVRKKVDN |
| | LVISVLEPDEDNPDHVELVERMAKMSFEGVSDNAIATTEEKEKIPSPGMAERRATEKRLASVKARR |
| | LNGAEKPIMWRAQTVRWILNHPAIGGFAFERVKHGKAHINVIRRDPGGKPLTPHTGILSGSKWLEL |
| | QEKRSGKNLSDRKPGAEVEPTLLSGWRFLGCRICGGSMGQSQGGRKRNGDLAEGNYMCANPKGH |
| | GGLSVKRSELDEFVASKVWARLRTADMEDEHDQAWIAAAAERFALQHDLAGVADERREQQAHL |
| | DNVRRSIKDLQADRKPGLYVGREELETWRSTVLQYRSYEAECTTRLAELDEKMNGSTRVPSEWFS |
| | GEDPTAEGGIWASWDVYERREFLSFFLDSVMVDRGRHPETKKYIPLKDRVTLKWAELLKEEDEAS |
| | EATERELAAL |
| 42 | MAQPLRALVGARVSVVQGPQKVSHIAQQETGAKWVAEQGHTVVGSFKDLDVSATVSPFERPDLG |
| | PWLSPELEGEWDILVFSKIDRMFRSTRDCVKFAEWAEAHGKILVFAEDNMTLNYRDKDRSGSLES |
| | MMSELFIYIGSFFAQLELNRFKSRARDSHRVLRGMDRWASGVPPLGFRIVDHPSGKGKGLDTDPEG |
| | KAILEDMAAKLLDGWSFIRIAQDLNQRKVLTNMDKAKIAKGKPPHPNPWTVNTVIESLTSPRTQGI |
| | KMTKHGTRGGSKIGTTVLDAEGNPIRLAPPTFDPATWKQIQEAAARRQGNRRSKTYTANPMLGVG |
| | HCGACGASLAQQFTHRKLADGTEVTYRTYRCGRTPLNCNGISMRGDEADGLLEQLFLEQYGSQPV |
| | TEKVFVPGEDHSEELEQVRATIDRLRRESDAGLIATAEDERIYEERMKSLIDRRTRLEAQPRRASGW |
| | VTQETDKTNADEWTKASTPDERRRLLMKQGIRFELVRGKPDPEVRLFTPGEIPEGEPLPEPSPR |
| 43 | MYELKYAVYVRVSTDRDEQVSSIENQIDICRYWIEKNGYEWDENSIYKDEAVSGTAWLERHAMQL |
| | ILEKVRRKELDTVVFKSIHRLGRDLRDALEIKEILLGHGVRLVTIEEGYDSYYEGKNDLKFEMYAMF |
| | ASQLPKTVSVSVSAALAAKVRRGEYTGGIVPYGYKIVDQKYTINEEEAELVRKMYELYDNGLGYM |
| | KIADAINDMGVPSRTGKLWAYPSIRAIITNAAYKGDYIMQKYAEVKVDGRKKMIINPKEKWVVFE |
| | NHHPAIITRDLWDRVNNSKTDKKTKRRVAIKNELRGLACCAHCRTPLALQQRMYKNKEGETRYYC |
| | YLICGRYKRMGARGCVKHSGLQYSDLRLFVLQKLKEKENDLEKVFNLNDTDKHQEKQKKLRKEK |
| | KELEIKRERLLDLYLDGGPIDKETFTKRDKNELKIIKEKELEILKLDDVKTLVVEQQKVKEAFELLEK |
| | SEDLYSTFKKLITRIEVSQDGVINIVYRFEE |
| 44 | MLGRLRLSRSTEESTSIERQREIVTAWADSNGHTVVGWAEDVDVSGAIDPFDTPSLGVWLDERRGE |
| | WDILCAWKLDRLGRDAIRLNKLFLWCQEHGKTVTSCSEGIDLGTPVGRLIANVIAFLAEGEREAIRE |
| | RVASSKQKLREIGRWGGGKPPFGYMGVRNPDGQGHILVVDPVAKPVVRRIVEDILEGKPLTRLCTE |
| | LTEERYLTPAEYYATLKAGAPRQQAEEGEVTAKWRPTAVRNLLRSKALRGHAHHKGQTVRDDQG |
| | RAIQLAEPLVDADEWELLQETLDGIAADFSGRRVEGASPLSGVAVCMTCDKPLHHDRYLVKRPYG |
| | DYPYRYYRCRDRHGKNVPAETLEELVEDAFLQRVGDFPVRERVWVQGDTNWADLKEAVAAYDE |
| | LVQAAGRAKSATARERLQRQLDILDERIAELESAPNTEAHWEYQPTGGTYRDAWENSDADERREL |
| | LRRSGIVVAVHIDGVEGRRSKHNPGALHFDIRVPHELTQRLIAP |
| 45 | MAYAVYVRVSSDKDEQVSSVENQIDICRYWLENNGFEWDENAVYFDDGISGTAWLERHAIQLVLE |
| | KARKKEIDTVVFKSIHRLARDLKDALEIKEILLGHGVRLITIEEGYDSHYEGKNDMKFEMYAMFAS |
| | QLPKTLSVSITAALAAKVRRGGYTGGFVPYGYEIIDGKYAINEEEAALVKEIFELYAQGFGYIKIANT |
| | INDKGARTRKGAPWTFSTLSKMIKNPAYKGTYIMQKYGTVKVNGRKKKVINPKEKWVIFEDHHPA |
| | IISHELWEKVNNKDPNKFKKKRRVSTTNELRGITVCAHCGTAMSKRNSINVSKNGTETEYSYMICN |
| | WSRITARRECVRHVPIHYKDLRALVLSKLKEKEKELDKEFGSDENQLQVKLRKLKKDINDLKFKRE |
| | RLLDLYLEDERIDKDTFTIRNAKIEKEIGLKEMEIRKASNIEIQMKEKQEVRDAFALLEESKDLHSVF |
| | QKLIKRIEVAQDGAIDIYYRFEE |
| 46 | MDRDGDGLAVERQREDCLKICTDRGWEPTQYIDNDTSASRGRRPSYERMLSDIRSGHIDAVVAWD |
| | LDRLHRQPKELEQFIELADEKRLSLATVGGDADLSTDNGRLFARIKGAVAKAEVERKSARQKRAFL |
| | QMAQSGKGWGPRAFGYNGDHEKAKIVPKEADALRSGYKMLMSGETLYSIAKSWNDAGLKTPRG |
| | NLFTGTTVRRILQNPRYTATRTYRNETVGDGDWPAIVDETTWEAAHSILSDPSRHQPRQVRRYLLG |
| | GLLTCSECGNKMAVGVQHRKNGNVPIYRCKHVSCGRVTRRVERMDEWVKELVLRRMSSRHWVP |
| | GNQDNRELALELREELDAIKHRMDSLAVDFAEGELTSSQLRIANERLQVKLDEVESKLRRTNVKPL |
| | PDGILTANDRGRFYDEMSLDARRALIEALCDSIVVHPIGLKGMQATHAPLGHNIDVHWHKPSNG |
| 47 | MNKVAIYVRVSTTMQAEEGYSIDEQIDKLTSYCKIKDWTVYDIYKDGGFSGGNIERPAMERLISDA |
| | NRKRFDTVLVYKLDRLSRSQKDTLYLIEEIFGKNDISFLSLNESFDTSTPFGKAMIGILSVFAQLEREQ |
| | IKERMLLGKIGRAKSGKSMMVSKVSFGYTYDKLKGELIVNQAEALVVRKIFDEYLGGRSLIKLRDY |
| | LNSNGIYRGDKYWNYRGLLLILSNPVYIGMIRYRGEIYPGNHQPIIDTEVFNKTQEEIKKRQIEALEFS |
| | NNPRPFRAKYMLSGLAKCGYCGTPLKIILGYKRKDGSRSMRYQCINRFPRNTKGITIYNDNKKCDS |
| | GFYEKADIEEFVIAQIRGLQLNSYKLDNMFDKQPIIDVEGIEKQITSLDNKLKRLNDLYLNDMIELDD |
| | LKKQTQSLRKQKTMLEDELINNPAIMQDKNKNHFKEILGTKDITTLDYETQKSIVNNLVNKVFVKA |
| | GHIKIEWKIPFKKV |
| 48 | MNTINKVAIYVRVSTSVQAEEGYSIDEQIDKLKSYCQIKDWTVYDVYKDGGFSGGNINRPALEKMII |
| | DAKKKRFDTVLVYKLDRLSRSQKDTLYLIEDVFSKNDISFLSLQENFDTSTPFGKAMVGLLSVFAQL |
| | EREQIKERMQLGMIGRAKSGKPMMFTNVSFGYTYSPKTQQLTINQAEAVIVKQIFNEFLGGMSPLR |
| | LMAYLNENNILRNGKEWNYQGIQRILRNPVYIGKIKYNNVIYPGLHEPIIDEESYYKAQKLLDARQD |
| | EMRVKGKNRQFKAKYMLSGTAKCGYCGAPLRIKIGNKRLDGTRLKVYQCCNRYPRKYAVVTYN |
| | DNKKCNSGNYQKEDLEQYVIAEIRKLQLKPEKIDKLFNKVSKIDTVQINKQIASIDKKINRLNDLYL |
| | NDMIDIDKLKADAEKFKEQKRVLEKELDKDLKIQEQEKNKEDFKKTIGFKDVTKLDYEEQSFIVKS |
| | LIDKILVKKGLIKILWKI |
| 49 | MNVAIYCRVSTLEQKEHGYSIEEQERKLKQFCEINDWNVADVFVDAGFSGAKRDRPELQRMMNDI |
| | KRFDLVLVYKLDRLTRNVRDLLDLLEIFEQNNVAFRSATEVYDTSTAMGRLFVTLVGAMAEWERE |
| | TIRERTQMGKLAALKKGIMLTTPPFYYDRVDNKFVPNKYKEVVLFAYEEALKGKSAKSIARKLNN |
| | SDIPPPNNRKWEDRSITRALRSPFTRGHFEWGGVYLENNHEPIITEEMYEKVKDRLEERTNTKKIKH |
| | VSIFRSKLVCPTCDSKLTMNTHKVTLKDRVYYNKHYYCNNCKETPNLKPVYVRSEEVERVFYEYL |
| | QHQDLTQYDIVEDKEEKEIVIDINKIMQQRKRYHKLYANGLMNEDELAELIEETDIAIEEYKKQSEN |
| | EEVKQYDTEDIKQYKNLLLEMWEVSSDEEKAEFIQIAIKNIFIEYVLGKNDNKKKRRSLKIKDIEFY |
| 50 | MTVGIYIRVSTEEQARDGFSISAQREKLKAYCIAQDWDSFKFYVDEGVSAKDTNRPQLNMMLDHI |
| | KQGLISIVLVYRLDRLTRSVMDLYKLLDTFDEYNCAFKSATEVYDTSTAMGRMFITIVAALAQWER |
| | ENLGERVRMGQLEKARQGEYSAKAPFGFDKNKHSKLVVNDIESKVVLDMVKKIEEGYSIRQLANH |
| | LDGYAKPIRGYKWHIRTILDILSNHAMYGAIRWSNEIIENAHQGIISKDRFLKVQKLLSSRQNFKKRK |
| | TTSIFMFQMKLICPNCGNHLTCERVTYHRKKDNKDIEHNRYRCQACVLNKKKAFSSSEKKIEKAFL |
| | DYIDEYRFTKIPELKKEADETKILKKKLSKIERQREKFQKAWSNDLMTDEEFADRMKETKNTLGEIK |
| | EELNKLGLNQDKKIDNDTVKRIVNDIKNKWSLLSPLEKKQFMSLFIKNIQLKKINEKNIVVNITFY |
| 51 | MYRPDSLDVCIYLRKSRKDVEEERRALEEGSSYNALERHRKRLFAIAKAENHNIIDIFEEVASGESIQ |
| | ERPQMQQLLRKLEGNEIDGVLVIDLDRLGRGDMLDAGMIDRAFRYSSTKIITPTDVYDPDDESWEL |
| | VFGIKSLISRQELKSITRRLQNGRIDSVKEGKHIGKKPPYGYLKDENLRLYPDPEKAWIVKKIFELMC |
| | DGKGRQMIAAELDRLGIDPPVTKRGAWDSSTITSIIKNEVYTGVIVWGKFKHKKRNGKYTRHKNPQ |
| | EKWIMYENAHEPIISKELFDAANEAHSSRHKPAVITSKELTNPLAGILKCKLCGYTMLIQTRKDRPH |
| | NYLRCNNPACKGKQKQSVFNLVEEKLLYSLQQIVDEYQAQKVEEVEIDDSKLISFKEKAIISKEKEL |
| | KELQTQKGNLHDLLEQGIYTVEIFLERQKNLVERITSIENDVEVLQKEIEIEQVKEHNKTEFIPALKTV |
| | IESYHKTTNVELKNQLLKTILSTVTYYRHPDWKANEFEIQVYFKI |
| 52 | MITTNKVAIYVRVSTTNQAEEGYSIEEQKDKLKSYCNIKDWNVFNVYTDGGFSGSNTERPALEQLI |
| | KDAKKKKFDTVLVYKLDRLSRSQKDTLYLIEDIFLENNIDFVSLLENFDTSTPFGKAMVGILSVFAQ |
| | LEREQIKERMQLGKLGRAKAGKSMMWAKVAYGYTYHKGSGEMTINELEAIVVREIFNSYLEGMSI |
| | TKLRDKINDTYPKTPAWSYRIIRQILDNPVYCGYNQYKGEVYKGNHEPIISEEDFNKTQDELKIRQR |
| | TAAEKFNPRPFQAKYMLSGIAQCGYCKAPLKIIMGAVRKDGTRFIKYECYQRHPRTTRGVTTYNNN |
| | QKCHSSSYYKQDVEDYVLREISKLQNDKKAIDELFENTNMDTIDRESIKKQIEAISSKIKRLNDLYID |
| | DRITIDELRKKSTEFTLSKTFLEEKLENDPILKQQESKDNIKKILSCDDILTMDYDQQKIIVKGLINKV |
| | QVTADKVIIKWKI |
| 53 | MITTNKVAIYVRVSTTNQVEEGYSIDEQKDKLSSYCDIKDWNVYKVYTDGGFSGSNTDRPALESLI |
| | KDAKKRKFDTVLVYKLDRLSRSQKDTLHLIEDVFIKNGIEFLSLQENFDTSTPFGKAMIGLLSVFAQ |
| | LEREQIKERMQLGKLGRAKSGKSMMWAKTSYGYDYHKETGTVTINPAQALTIKFIFESYLRGRSIT |
| | KLRDDLNEKYPKHVPWSYRAVRTILDNPVYCGFNQYKGEIYPGNHEPIISKEEYDKTQSELKIRQRT |
| | AAENVNPRPFQAKYILSGIAQCGYCGAPLKIMLGVKRKDGSRLKKYECHQRHPRTLRGVTTYNDN |
| | KKCDSGFYYKDKLEAYVLKEISKLQDDADYLDKIFSGDNAETIDRESYKKQIEELSKKLSRLNDLYI |
| | DDRITLEELQSKSAEFISMRGTLETELENDPALRKNKRKADMRKLLNAEKVFSMDYESQKVLVRRL |
| | INKVKVTAEDIVINWKI |
| 54 | MKCVIYRRVSTDMQVEEGISLDMQKLRLEQYAKSQDWIVVNDYCDEGYSAKNTERPAFQQMIRD |
| | MKKKQFDIILVYRLDRFTRSVSDLHSILKIMDEYNVKFKSSTEIFDTTTATGRMFITLVATLAQWER |
| | ETTAERVRDSMHKKAELGLRNGAKAPMGYNLKKGNLYINHTEAEIVKYIFEMYKTKGVVSIVKSL |
| | NSRGVKTKQGKIFNYDAVRYIINNPIYIGKIRWGEDILTDIAQEDFETFINKDTWYTVQQIQDSRKVG |
| | KVRLQNFFVFSNVLKCARCGKHFLGNRQVRSHNRIAVGYRCSSRHHQGICDMPQVPENILEKEFLN |
| | LLEDAVVELDASDEKPVELSNLQEQYNRIQDKKARLKFLFIEGDIPKKEYKKDMLTLNQEENIIQKQ |
| | LANITDTVSSIEIKELLNQLKDEWNNLNNESKKAAVNAIISSITVDIIKPARAGKNPIPPVIKVMDFKL |
| | K |
| 55 | MKKAIAYMRFSSPGQMSGDSLNRQRRLIAEWLKVNSDYYLDTITYEDLGLSAFKGKHAQSGAFSE |
| | FLDAIEHGYILPGTTLLVESLDRLSREKVGEAIERLKLILNHGIDVITLCDNTVYNIDSLNDPYSLIKAI |
| | LIAQRANEESEIKSSRVKLSWKKKRQDALESGTIMTASCPRWLSLDDKRTAFVPDPDRVKTIELIFK |
| | LRMERRSLNAIAKYLNDHAVKNFSGKESAWGPSVIEKLLANKALIGICVPSYRARGKGISEIAGYYP |
| | RVISDDLFYAVQEIRLAPFGISNSSKNPMLINLLRTVMKCEACGNTMIVHAVSGSLHGYYVCPMRR |
| | LHRCDRPSIKRDLVDYNIINELLFNCSKIQPVENKKDANETLELKIIELQMKINNLIAALSVAPEVTAI |
| | AEKIRVLDKELRRASVSLKTLKSKAVSSLGDFHAIDLTSKNGRELCRTLAYKTFEKIIINTDNKTCDI |
| | YFMNGIVFKHYPLMKTISAQQAISTLKYMVDGEVYF |
| 56 | MKKAIAYMRFSSPGQMSGDSLNRQRRLITEWLKVNSDYYLDTVTYEDLGLSAFNGKHAQSGAFSE |
| | FLDAIEHGYILPGTTLLVESLDRLSREKVGEAIERLKLILNHGIDVITLCDNTVYNIDSLNEPYSLIKAI |
| | LIAQRANEESEIKSSRVKLSWKKKRQDALESGTIMTASCPRWLSLDDKRTAFVPDPDRVKTIELIFK |
| | LRMERRSLNAIAKYLNDHAVKNFSGKESAWGPSVIEKLLANKALIGICVPSYRARGKGISEIAGYYP |
| | RVISDDLFYAVQEIRLAPFGISNSSKNPMLINLLRTVMKCEACGNTMIVHAVSGSLHGYYVCPMRR |
| | LHRCDRPSIKRDLVDYNIINELLFNCSKIQPVENKKDANETLELKIIELQMKINNLIAALSVAPEVTAI |
| | AEKIRVLDKELRRASVSLKTLKSKAVSSLGDFHAIDLTSKNGRELCRTLAYKTFEKIIINTDNKTCDI |
| | YFMNGIVFKHYPLMKTISAQQAISTLKYMVDGEVYF |
| 57 | MKTAIYLRKSRADLEAEARGEGETLAKHRTTLLKIAKEMNLNVLAVREEIVSGESLVKRPEMLALL |
| | EEIEDNKYDVVLCMDMDRLGRGGMKEQGIILETFKRSNTKIMTPRKTYDLNDEWDEEYSEFEAFM |
| | ARKELKIITRRMQRGRIASVEAGNYLGTHAPYGYDIHRLNKRERTLTINSEEASVVRMIFDWYANE |
| | DMGANAIRSKLNDLGYKSKLGNEWNPYSILDILKNNVYIGKVTWQKRKEVKRPDAVKRSCARQD |
| | KSDWIIADGKHEPIIPESLFEQVQEKLNSRYHVPYNTNGIKNPLAGIIKCSKCGYSMVQRYPKNRKE |
| | TMDCKHRGCENKSSYTELIEKRLLEALKEWYINYKADIALKHKQDDKLKETQVIQMNEAALRKLEK |
| | ELVDVQKQKNNLHDLLERGVYTVDMFLERSNVVSDRITEITSTMENLKKEIKTEIKKEKVKKDTIPQ |
| | VEHVLDLYFKTDDPKKKNSLLKSVLEKAVYKKEKWQRLDDFELVLYPKLPQDGDI |
| 58 | MKTAIYLRKSRADLEAEARGEGETLAKHRTTLLKIAKEMNLNVLSVREEIVSGESLVKRPEMLALL |
| | EEIEDNKYDVVLCMDMDRLGRGGMKEQGIILETFKRSNTKIMTPRKTYDLNDEWDEEYSEFEAFM |
| | ARKELKIITRRMQRGRVASVEAGNYLGTHAPFGYDIHRLNKRERTLTINPEEASVVRMIFDWYANE |
| | DMGANAIRSKLNDLGYKSKLGNEWNPYSILDILKNNVYIGKVTWQKRKEVKRPDAVKRSCTRQD |
| | KSDWIIADGKHEPIIPESLIALQVQEKLNSRYHIPYNTNGIKNPLAGIIKCSKCGYSMVQRYPKNRKET |
| | MDCKHRGCENKSSYTELIEKRLLEALKEWYINYKADIALKHKQDDKLKETQVIQMNEAALRKLEKE |
| | LVDVQKQKNNLHDLLERGVYTVDMFLERSNVVSDRITEITSTMENLKKEIKTEIKKEKVKKDTIPQ |
| | VEHVLDLYFKTDDPKKKNSLLKSVLEKAVYKKEKWQRLDDFELVLYPKLPQDGDI |
| 59 | MKVAIYTRVSSAEQANEGYSIHEQKRKLISFCEVNDWNRYEVFSDPGVSGGSMKRPSLQKLFDRLE |
| | EFDLVLVYKLDRLTRNVRDLLEMLEVIALKNNIAFKSATEVFDTNSAIGKLFITMVGAMAEWERETI |
| | RERSLMGSHAAIRSGKYIRARPFCYDLIDDKLKPNQHAKYIRFMVDKLMIGKSASEVVRQLESKKK |
| | PPGITKWNRKMILNKSPNPVMRGHTKFGDLLIENTHEPIISEDEYLKLIDIIEKRTYKTKSKHKAIFRG |
| | VLECPRCQSKLHLSRSIKKYDNGKTREVRRYSCDKCHRDNTVKNISFNESEIERQFINTLLKKGTDN |
| | FKISVPKKKSYDIEDNKVKINEQRANYTRSWSLGYIKDEEYFMLMDETENLLKDIEEKAKSHTDEK |
| | LNEEQIRTVKNLLIKGFKIATLEDKEDLITSSVDVIKFEFIPKEFNKNKTLNTVKINEIQFKF |
| 60 | MKYAVYVRVSTDKDEQVSSIQNQIEICRYWIEKNGFEWDENSIYKDEAVSGTAWLERRAMQLILG |
| | KARKKELDTVVFKSIHRLGRDLRDALEIKEILLGHGVRLVTIEEGYDSYYEGENDLKFEMYAMFAS |
| | QLPKTLSVSISAALAAKVRRGEYTGGTVPYGYKIVDKKYVINQEEAEIVREMYELYDNGLGYLRIS |
| | NALNDVGKYKRSGKLWTYSAVKLIITNPMYKGDYVMGRSTEVKVDGRKKRIQEPREKWVVFENH |
| | HPAIIERSLWDKINNPKINKKIKRRVAVTNELRGIARCIHCGSPFVLHTYKYKNKEGEELNYGYLTC |
| | GTYKLTGGRGCVKHSGLRYERLRSLVLRKLKEKERDLEKVFKLNDKDKHQEKQKKLRKEKKELEI |
| | KRERLLDLYLDGGSIDKATFTKRDANFAKNIKEKELEILKLDDVKALIVEQQKVKDAFKLLEDSEN |
| | LYPVFKKLIARIDISQNGAVDIRYRFEE |
| 61 | MKYAVYVRVSTDKDEQVSSIQNQIEICRYWIEKNGFEWDENSIYKDEAVSGTAWLERRAMQLILG |
| | KARKKELDTVVFKSIHRLGRDLRDALEIKEILLGHGVRLVTIEEGYDSYYEGKNDLKFEMYAMFAS |
| | QLPKTLSVSISAALAAKVRRGEYTGGTVPYGYKIVDKKYVINQEEAEIVREMYELYDNGLGYLRIS |
| | NALNDVGKYKRSGKLWTYSAVKLIITNPMYKGDYVMGRSTEVKVDGRKKRIQEPREKWVVFENH |
| | HPAIIERPLWDKINNPKINKKIKRRVAVTNELRGIARCIHCGSPFVLHTYKYKNKEGEELNYGYLTC |
| | GTYKLTGGRGCVKHSRLRYERLRSLVLRKLKEKERDLEKVFKLNDKDKHQEKQKKLRKEKKELEI |
| | KRERLLDLYLDGGSIDKETFTKRDANFAKNIKEKELEILKLDDVKALIVEQQKVKDAFKLLEDSENL |
| | YPVFKKLIARIDISQNGAVDIRYRFEE |
| 62 | MMTTNKVAIYVRVSTTNQAEEGYSIDEQKDKLSSYCHIKDWSIYNIYTDGGFSGSNTERPALEQLV |
| | KDAKNKKFDTVLVYKLDRLSRSQKDTLYLIEDIFLENKIDFVSLLENFDTSTPFGKAMVGILSVFAQ |
| | LEREQIKERMQLGKLGRAKSGKSMMWAKTSYGYDYHKETGEMTINELEAIVIREIFQSYLGGRSIT |
| | KLRDDINQRYPKTPAWSYRIIRQILDNPVYCGYNQYKGKIYKGNHEPIISEEVYNKTQEELKIRQRT |
| | AAEKFNPRPFQAKYMLSGIAQCGYCQAPLTIIMGMVRKDGTRFIKYECKQRHPRKTTGVTVYNNN |
| | EKCHSGAYQKEEVEEYVLKEISKLQNDTSYLDEIFSTPETESIDRDSYQKQIDELTKKLSRLNDLYID |
| | DRITLEELQKKSAEFTTIRAFLEAELENDPSLKQQEKKEDMRKILGAEDIFLMDYEGQKTMVKGLIN |
| | KVQVTAEDISIKWKI |
| 63 | MNKVAIYVRVSTTMQAEEGYSIDEQIDKLKSYCKIKDWTVYDIYKDGGFSGGNIERPAMERLISDA |
| | KRKKFDTVLVYKLDRLSRSQKDTLFLIEEVFDKNDISFLSLNESFDTSTAFGKAMIGILSVFAQLERE |
| | QIKERMLLGKIGRAKTGKSMMFSKVSFGYTYDKLKDELVVNQAESIIVRKIFDAYLGGLSLNKLRD |
| | YLNNNGIYRGDKPWNYQGLRRILSNPVYIGMIRYREEIYPGNHKAIIDIDDYNKTQEEIKKRQIKALE |
| | FSNNPRPFRSKYMLSGIAKCGYCGTPLQIILGSKRKDGTRNMRYQCINRFPRNTKGVTIYNDGKKCE |
| | SGFYEKADIEEFVINEIRSLQINYNKLDAMFDRHPTVNSDDIKKQIITLDNKLKRLNDLYINNMIELD |
| | DLKKQTQSLRKQKTILEDELLNNPAITQEKNKKHFKEMLATKDITKLDYETQKNIVNNLINKVFVK |
| | SGYIKIEWKIPFKKA |
| 64 | MRKVYSYIRFSSTKQAFGDSHRRQSKAIQDWLASHPDHILDESLSFEDLGRSAFHGDHLKEGGALR |
| | AFLEAVKQGLIPPDSVLLVESLDRVSRQSISHAQETIRAILEQGITVVTLSDGETYNRQSLDDSLALIR |
| | MIILQERSHNESVIKSDRIKKVWSHKRQQFEQDGTKITGNCPGWLKLNSDGKSFSLIPHHVETIHRIF |
| | DEKLSGKSLHAIARDLNLENIPTITNKKVDTGWTPTRVRDLLLKESLIGVAYGVSDYFPPAISKEKFH |
| | AVQMISKRPISDVL |
| 65 | MKTAIYLRKSRADLEAEARGEGETLAKHRSTLLKIAKEMNLNVLAVREEIVSGESLVKRPEMLALL |
| | EEIEDNKYDAVLCMDMDRLGRGGMKEQGIILETFKRSNTKIMTPRKTYDLNDEWDEEYSEFEAFM |
| | ARKELKIITRRMQRGRIASVEAGNYLGTHAPFGYDIHRLNKRERTLTLNSEEASVVRMIFDWYANE |
| | DMGANAIRSKLNDLGYKSKLGNEWNPYSILDILKNNVYIGKVTWQKRKEVKHPDTVKRSCARQD |
| | KSDWIIADGKHEPIIPESLFEQVQEKLNSRYHIPYNTNGIKNPLAGIIKCAKCGYSMVQRYPKNRKET |
| | MDCKHRGCENKSSYTELIEKRLLEALKEWYINYKADFEKHKQDDKLKETQVIQMNEAALRKLEKE |
| | LVDVQKQKNNLHDLLERGVYTVDMFLERSNVVSVRITEITSTMENLKKEIKTEIKKEKVKKDTIPQ |
| | VEHVLDLYFKTDDPKKKNSLLKSVLEKAVYKKEKWQRLDDFELVLYPKLPQDGDI |
| 66 | MRIVNKIEAKTPQIPHRKRVAAYARVSMESERLQHSLSAQVSFYSSLIQSNPAWEYVGVYADNGIT |
| | GTKAEAREEFNRMIADCEAGKIDIVLTKSISRFARNTVDLLNTVRRLKELGVSVQ1ALKERIDSLTED |
| | GELMLTLLASFAQEEIRSLSDNVKWGTRKRFEKGIPNGRFQIYGYRWEGDHLVIHEEEAKIVRLIYD |
| | NYMNGLSAETTEKQLAEMGVKSYKGQHFGNTSIRQILGNITYTGNLLFQKEYVADPISKKSRINRG |
| | ELPQYFVENTHEAIIPMEVYQAVQAEKARRRELGALANWSINTSCFTSKIKCGRCGKSYQRSNRKG |
| | RKDPNANYTIWVCGTRRKTGNAYCQNKDIPEQMLKDACAEVMGLDTFDEIIFSEQIDHIEIPAPNEM |
| | IFYFKDGRIVPHHWESTMRKDCWTDERRAAKGRYVQEHQLGPNTSCFTSRIRCDSCGENYRRQRS |
| | RHKDGSFDSVWRCASGGKCQSPSIKEDALKNLCADAMGLEEFSETVFREQIVCIHITAPYQLSIRFF |
| | DGHTIALTAWENKRKMPRHTEERKQHMREVMIQRWREKRGESNDNTCDDKPIHGNADQ |
| 67 | MKGESELDKKAAIYIRVSTQEQATEGYSIQAQTDRLTKYVEAKDFILYKKYIDAGYSASKLERPAM |
| | QELIQDVKSKKVDVVIVYKLDRLSRSQKDTMYLIEDIFRPNDVELISMQESFDTSTAFGSATVGMLS |
| | VFAQLERKSISERMITGRVERAKKGFYHTGGQDRPPAGYQFNSDNQLIINEYEAAAIKDLFRLYND |
| | GLGKSSISEYLKKNYPGKNKWLPSSIDRMLKNSLYIGKVKFSGVEYDGIHEPIIDEVTFYKTQKEIAR |
| | RKQSNTKRYNYVALLGGLCECGICGAKMANRRAVGRKGKVYRYYRCYSKKGSPKHMMKTDGCS |
| | SKAQQQFIIDEAVINNLKNIDVEAELKRRSAPQTNTSLISSQIESIDKQINKLIDLFQVDSMPLDVISEK |
| | IDKLNKEKQSMEKLLERKNRLDKTELQHRFDILKSFDWDNSSIESKRAVIEMLVQKVIIHDNSIEIILV |
| | E |
| 68 | MKGESELDKKAAIYIRVSTQEQATEGYSIQAQTDRLTKYVEAKDFILYKKYIDAGYSASKLERPAM |
| | QELIQDVQSKKVDVVIVYKLDRLSRSQKDTMYLIEDIFRPNDVELISMQESFDTSTAFGSATVGMLS |
| | VFAQLERKSISERMITGRVERAKKGFYHTGGQDRPPAGYQFNSDNQLIINEYEAAAIKDLFRLYND |
| | GLGKSSISEYLKKNYPGKNKWLPSSIDRMLKNSLYIGKVKFSGAEYDGIHEPIIDEVTFYKTQKEIAR |
| | RKQSNTKRYNYVALLGGLCECGICGAKMANRRAVGRKGKVYRYYRCYSKKGSPKHMMKTDGCS |
| | SKAQQQFIIDEAVINNLKNIDVEAELKRRSAPQTNTSLISSQIESIDKQINKLIDLFQVDSMPLDVISEK |
| | IDKLNKEKQSMEKLLERKNKLDKTELQHRFDVLKSFDWDNSSIESKRVVIEMLVQKVIIHDNSIEIIL |
| | VE |
| 69 | MDKKAAIYIRVSTQEQATEGYSIQAQTDRLTKYVEAKDFILYKKYIDAGYSASKLERPAMQELIQD |
| | VQSKKVDVVIVYKLDRLSRSQKDTMYLIEDIFRPNDVELISMQESFDTSTAFGSATVGMLSVFAQLE |
| | RKSISERMITGRVERAKKGFYHTGGQDRPPAGYQFNSDSQLIINEYEAAAIKDLFRLYNDGLGKSSIS |
| | EYLKKNYPGKNKWLPSSIDRMLKNSLYIGKVKFSGTEYDGIHEPIIDEVTFYKTQKEIARRKQTNTK |
| | RYNYVALLGGLCECGICGAKMANRRAVGRKGKVYRYYRCYSKKGSPKHMMKTDGCSSKAQQQF |
| | IIDEAVINNLKNIDVEAELKRRSAPQTNTSLISSQIESIDKQINKLIDLFQVDSMPLDVISEKIDKLNKE |
| | KQSMEKLLERKNKLDKTELQHRFDVLKSFDWDNSSIESKRVVIEMLVQKVIIHDNSIEIILVE |
| 70 | MKGESELDKKAAIYIRVSTQEQATEGYSIQAQTDRLIKYVEAKDFILYNKYIDAGYSASKLERPAM |
| | QELIQDVQSKKVDVVIVYKLDRLSRSQKDTMYLIEDIFRPNDVELISMQESFDTSTAFGSATVGMLS |
| | VFAQLERKSISERMITGRVERAKKGFYHTGGQDRPPAGYQFNSDNQLIINEYEAAAIKDLFRLYND |
| | GLGKSSISEYLKKNYPGKNKWLPSSIDRMLKNSLYIGKVKFSGAEYDGIHEPIIDEVTFYKTQKEIAR |
| | RKQTNTKRYNYVALLGGLCECGICGAKMANRRAVGRKGKVYRYYRCYSKKGSPKHMMKTDGCS |
| | SKAQQQFIIDEAVINNLKNIDVEAELKRRSAPQTNTSLISSQIESIDKQINKLIDLFQVDSMPLDVISEK |
| | IDKLNKEKQSMEKLLERKNRLDKTELQHRFDVLKSFDWDNSSIESKRVVIEMLVQKVIIHDNSIEIIL |
| | VE |
| 71 | MKGESELDKKAAIYIRVSTQEQATEGYSIQAQTDRLIKYVEAKDFILYKKYIDAGYSASKLERPAM |
| | QELIQDVQSKKVDVVIVYKLDRLSRSQKDTMYLIEDIFRPNDVELISMQESFDTSTAFGSATVGMLS |
| | VFAQLERKSISERMITGRVERAKKGFYHTGGQDRPPAGYQFNSDNQLIINEYEAAAIKDLFRLYND |
| | GLGKSSISEYLKKNYPGKNKWLPSSIDRMLKNSLYIGKVKFSGAEYDGIHEPIIDEVTFYKTQKEIAR |
| | RKQTNTKRYNYVALLGGLCECGICGAKMANRRAVGRKGKVYRYYRCYSKKGSPKHMMKTDGCS |
| | SKAQQQFIIDEAVINNLKNIDVEAELKRRSAPQTNTSLISSQIESIDKQINKLIDLFQVDSMPLDVISEK |
| | IDKLNKEKQSMEKLLERKNKLDKTELQHRFDVLKSFDWDNSSIESKRVVIEMLVQKVIIHDNSIEIIL |
| | VE |
| 72 | MNYERSYLRSCQVSTLEQKEHGYSIEEQERKLKSFCEINDWSVSDVFIDAGFSGAKRERPELQRMM |
| | NDIKRFDLVLVYKLDRLTRNVRDLLDLLEIFEQNNVAFRSATEVYDTSTAMGRLFVTLVGAMAEW |
| | ERETIRERVMMGKRAAIKQGMILTPPPFYYDRVDNTYIPNDYKKVVLWAYDEVMKGVSSKGIARK |
| | LNDSDIPPPNGKRWEDRTITRALRSPITRGHYTWGDVFIENSHEPIITEEMYQQIKERLEERINTKIVS |
| | HVSVFRGKFICPRCGGTLTLNTVTRKRKKGYVTYKTYYCNTCKAKKESFGFSENEALRVFRDYLSE |
| | LDLDKYKVKTKQNDDVVTIDIDKIMEQRKRYHKLYAKGLMQEEELFELIKETDETIAEYEKQKELV |
| | PRKSLDIDKIKKFKNALLESWEIFSLEDKADFIKMAIKSIDIEYVKLKNRHSIEIKDIEFY |
| 73 | MNYERSYLRSCQVSTLEQKEHGYSIEEQERKLKSFCEINDWSISDVFIDAGFSGAKRERPELQRMM |
| | KDIKRFDLVLVYKLDRLTRNVRDLLDLLEIFEQNNVAFRSATEVYDTSTAMGRLFVTLVGAMAEW |
| | ERETIRERVMMGKRAAIKQGMILTPPPFYYDRVDNTYVPNNYKKVVLWAYDEVLKGVSSKGIARK |
| | LNDSDIPPPNGKRWEDRTITRALRSPITRGHYTWGDVFIENSHEPIITEEMYQQIKERLEERINTKIVS |
| | HVSVFRGKFICPKCGGTLTMNTATRKRKKGYVTYKTYYCNTCKTKKQSFGFSENEALRVFRDYLS |
| | KLDLEKYEIKTKQKDDVVTIDIDKIMEQRKRYHKLYAKGLMQEEELFELIKETDETIAEYEKQKELA |
| | PSKTLDVAKIKKFKNALLESWKIFSLEDKADFIKMAIKSIDIDYVKLKNRHSIKINDIEFY |
| 74 | MNYERRYIRSCQVSTLEQKEHGYSIEEQERKLKSFCEINDWSVSDVFIDAGFSGAKRDRPELQRMM |
| | NDIKRFDLVLVYKLDRLTRNVRDLLDLLEIFEQNNVAFRSATEVYDTSTAMGRLFVTLVGAMAEW |
| | ERETIRERVMMGKRAAIKQGMILTPPPFYYDRVDNTYIPNDYKKVVLWAYDEVMKGNSSKAIARK |
| | LNDSDIPPPNGKRWEDRTITRALRNPITRGHYTWGDVFIENSHEPIITEEMYQQIKERLEERINTKIVS |
| | HVSVFRGKFICPRCGGTLTMNTATRKRKKGYVTYKTYYCNTCKTRKQSFGFSENEALRVFRDYLS |
| | KLDLDKYEVKTKQKDDVVTIDIDKIMEQRKRYHKLYAKGLMQEEELFELIKETDETIAEYEKQKEL |
| | VPRKILDIDKIKSFKNVLLESWNIFSLEDKADFIKMAIKSIEIEYVELKNRHSIEIKEIEFY |
| 75 | MKTAIYLRKSRADLEAEARGEGETLAKHRTTLLKIAKELNLDVLSVREEIVSGESLVKRPEMLALLE |
| | EIEDNKYDVVLCMDMDRLGRGGMKEQGIILETFKRSNTKIMTPRKTYDLNDEWDEEYSEFEAFMA |
| | RKELKIITRRMQRGRIASVEAGNYLGTHAPYGYDILRLNKRERTLTINSEEASVVRMIFEWYANED |
| | MGASVITNKLNQLGYKSKLGNDWNPYSVLDMLKNNIYIGKVTWQKRKEVKRPDATKRSCARQDK |
| | SEWIIADGKHDPIISKSLFEKAQEKLNTRYHVPYNTNGLKNPLAGIIRCGKCGYSMVQRYPKNRKKT |
| | MDCKHRGCENKSSYTELIERRLLEALKEWYINYKADFAKNNQDSLSKEKQVIKINQAALRKLEKEL |
| | LDVQKQKNNLHDLLERGVYTVDMFLERSNVVSDRMNEITEMMENLQKEINTEIKKERVKKDTIPQ |
| | VEHVLDLYFKTDDPKKKNSLLKSVLEKAVYTKEKWQRLDDFKLVLYPRLPKDGDK |
| 76 | MKIAIYSRKSVSTDKGESIKNQIEICKEYFLRRNTNIEFEIFEDEGFSGGNTNRPAFKFMMSKIKMFD |
| | VVACYKIDRIARNIVDFVNVYDELNKLGIKLISVTEGFDPSTPLGKLIMMILASFAEMERENIRQRVK |
| | DNMKELAKAGRWTGGNVPFGFISQRIEEGGKKATYLKLDENKKQLIKEIFDMYISANSMHKVQKQ |
| | LYIIHNIKWSLSTIKNILTSPVYVKADKDVVKYLNNFGKVFGEPNGANGMITYNRRPYTNGKHRWN |
| | DKGMFYSISRHEGIIDSSTWLKVQSIQEKTKVAPRPKNSKVSYLTGILKCAKCGSPMTISYNHKNKD |
| | GSITYVYLCTGRKTYGKEYCTCKQVKQTIMDKEIENALNSYIQLNIEEFKKVIGSPNDTENFNKNILC |
| | IEKKIETNKVKINNLVDKISILSNTASAPLLSKIEELTKLNEDLKKELLFIQQEHINSTFVSPEEKYERL |
| | KQFSYTLNTNDIDLKRELLSFSVQEIKWDSDEKCIDIII |
| 77 | MHKAAAYARYSSDNQREESIEAQLRAIREYCQKNNIQLVKIYTDEAKSATTDDRPGFLQMIQDSSM |
| | GLFSAVIVHKLDRFSRDRYDSAFYKRQLKKNGVRLISVLENLDDSPESIILESVLEGMAEYYSRNLA |
| | REVMKGMRETALQCKHTGGKPPLGYDVAEDKTYIVNEQEAQAVRLIFEMYASGKGYSDIMYALN |
| | KEGYRTQTGRPFGKNSIHDILRNEKYRGVFIFNRTERKINGKRNHHRNKDDSEIIRIEGGMPRIIDDE |
| | TWERVQERMSKNKKGANSAKENYLLAGLIYCGKCGGAMTGNRHRCGRNKTLYVTYECSTRKRT |
| | KECDMKAINKDYIENLVIEHLEKNVFAPEAIERLVAKISEYAASQVEEINRDIKTFTDQLAGIQTEIN |
| | NIVNAIAAGMFHPSMKEKMDELETKKANLLLKLEEAKFVFCK |
| 78 | MKAAIYIRVSTQEQVENYSIQAQTEKLTALCRSKDWDVYDIFIDGGYSGSNMNRPALNEMLSKLHE |
| | IDAVVVYRLDRLSRSQRDTITLIEEYFLKNNVEFVSLSETLDTSSPFGRAMIGILSVFAQLERETIRDR |
| | MVMGKIKRIEAGLPLTTAKGRTFGYDVIDTKLYINEEEAKQLQMIYDIFEEEKSITSLQKRLKKLGF |
| | KVKSYSSYNNWLTNDLYCGYVSYADKVHTKGVHEPIISEEQFYRVQEIFSRMGKNPNMNRDSASL |
| | LNNLVVCSKCGLGFVHRRKDTVSRGKKYHYRYYSCKTYKHTHELEKCGNKIWRADKLEELIIDRV |
| | NNYSFASRNVDKEDELDNLNEKLKTEHTKKKRLFDLYISGSYEVSELDAMMADIDAQINYYEAQIE |
| | ANEELKKNKKIQENLADLATVDFDSLEFREKQLYLKSLINKIYIDGEQVTIEWL |
| 79 | MKTIHKLARPQLPEPPKLKVAAYARASTSSNEQLASLQTQITHYENHIQNNDQWEYVGVYYDEGT |
| | SGTKVEKRDGLHRLIKDAELGKIDLILTKSISRFSRNTVDCLNLVRKLTDIGVTIFFEKENINTGDMES |
| | ELLLSILSSLAESESYSHSENMKWANRKRMAKGIFKTVPPYGYQRKGADFYLIPDEAKVIEQIFKWA |
| | LEGVSAYQVAKRLNEKNIFTRKGSKWQDSGINNILHNIVYTGTMIHQRYFNDDQFRKKKNNGELP |
| | MYRIDNNHPPIISWEDYERVQELITLRANAKGTSKGSQKYSQRYVFTKRIICDKCGCNYKRVHIAGK |
| | GNTKVVKWSCTGHLKNKDGCDALPITDESLKTAYLTMLNKLILGHTIVLEPLINTPVEGKASKQEL |
| | EKLSIEITKIDEKLEVLASLNASGVVSTKTALEEQGRLQMELNKLQEKQHKIMESVNGTSTQRIQLE |
| | QLHQFTKRSEMLTEWDEDLFLRFAELIVVYSRQEVSFELKCGLLLKERLEA |
| 80 | MPIQKSRRLSKVAGKKVTVIPMKPRQWAAENTEEKPKLKVAAYCRVSTEMEEQASSYEAQVQHY |
| | TDYIQRNPDWELAGIFADEGISGTGTKKRDGFNRMIEACQKGDVEYIITKSISRFARNTVDCLQYIRQ |
| | LKDLHIAVFFEKENINTMDAKGEVLLTIMASLAQQESQSLSQNTKMGVQYRFQQGQLRINHNHFLG |
| | YTKDEDGNLVIEPKEAEVIKRIFREYLEGSSLQEIANGLMSDGILTGGKRKLWRGEGVRLILRNEKY |
| | MGDALLQKTYTTDFLTKKRVKNDGSYAQQYYVENSHPAIIPRDIFMQVQQELDRRKSMKNKHSQ |
| | CFSGKYALSGITVCGDCGNAYRRVHWKNRGTVWRCKSRVDKREHNCSGRTIYEKDLHEAIIKAIN |
| | ETVVDREDFLQQLSENINSVLTDGLTGRLEELDSKLKELESEIISMAIGGQGYDELASQIFSLRDERD |
| | AVAKQIAANTNLQQRVDEMVVFVKEHDVINEYSEVLVRRLIEKVTIFEKNIVVDFKSGVRVTVEI |
| 81 | MKAAIYIRVSTQEQIENYSIQAQTEKLTALCRSKDWDVYDIFIDGGYSGSNMNRPALNEMLSKLHEI |
| | DAVVVYRLDRLSRSQRDTITLIEEYFLKNNVEFVSLSETLDTSSPFGRAMIGILSVFAQLERETIRDR |
| | MVMGKIKRIEAGLPLTTAKGRTFGYDVIDTKLYINEEEAKQLRLIYDIFEEEQSITFLQKRLKKLGFK |
| | VRTYNRYNNWLTNDLYCGYVSYKDKVHVKGIHEPIISEEQFYRVQEIFSRMGKNPNMNKESASLL |
| | NNLVVCSKCGLGFVHRRKDTVSRGKKYHYRYYSCKTYKHTHELEKCGNKIWRADKLEELIIDRVN |
| | NYSFASRNIDKEDELDSLNEKLKIEHTKKKRLFDLYISGSYEVSELDAMMSDIDAQINYYEAQIEAN |
| | EELKKNKKIQENLADLATVDFNSLEFREKQLYLKSLINKIYIDDEQVTIEWL |
| 82 | MRYTTPVRAAVYLRISEDRSGEQLGVARQREDCLKLCGQRKWVPVEYLDNDVSASTGKRRPAYE |
| | QMLADITAGKIAAVVAWDLDRLHRRPIELEAFMSLADEKRLALATVAGDVDLATPQGRLVARLKG |
| | SVAAHETEHKKARQRRAARQKAERGHPNWSKAFGYLPGPNGPEPDPRTAPLVKQAYADILAGASL |
| | GDVCRQWNDAGAFTITGRPWTTTTLSKFLRKPRNAGLRAYKGARYGPVDRDAIVGKAQWSPLVD |
| | EATFWAAQAVLDAPGRAPGRKSVRRHLLTGLAGCGKCGNHLAGSYRTDGQVVYVCKACHGVAI |
| | LADNIEPILYHIVAERLAMPDAVDLLRREIHDAAEAETIRLELETLYGELDRLAVERAEGLLTARQV |
| | KISTDIVNAKITKLQARQQDQERLRVFDGIPLGTPQVAGMIAELSPDRFRAVLDVLAEVVVQPVGKS |
| | GRIFNPERVQVNWR |
| 83 | MEKVAIYIRVSKKEQTRDKGSDSSLNLQLKKCLDYCKEKGYEVLKVYQDIESGRIDDRKEFNELFE |
| | AISKKIYTKIVFWEISRIARKISTGMKFFEELELYKITFDSISQPYLKDFMTLSIFLAWGTEDLKQMSL |
| | RIKSNLEEKTKAGYFVHGRPATGYIRGENKMIIPDPEKAPYILSIFETYAKNFNLTETARIFNKTRMDI |
| | VDIIDNKIYIGYVPFRKYIQELNQKKRIQVSKKDIKWYKGLHEPIVPLELFEFCQSIREKNIKSRAAYG |
| | DYKPHLLFSSMIYCECGDKMYQQKRNRTYKDNTNYVYYSYSCKNRKHKKSFSARIMDKTIKEMIL |
| | NSKELEDLNNYNSNDIEKNEKKLLKLEKNLKVLENERERIINLFQKSYISEDELENRFKDLNARIKIA |
| | KEKKIEFEKNLNIPKNNDIKLLEKLKFIIENYDEEDVIETRKILKMLIKEIRVISFYPLKISILFY |
| 84 | MQTLQAKIAVKYSRVSTNKQDLRGSKDGQEAEIDKFAIANNFTIISSFTDTDHGDIAKRKGLSSMKE |
| | YLRLNQAVKYVLVYHSDRFTRSFQDGMRDLFFLEDLGIKLISVLEGEIVADGTFNSLPSLVRLIGAQ |
| | EDKAKIIKKTTDASYKYAKTNRYLGGNILPWFKLESGYVYGKKCKVIVKNEATWEYYRGFFLAMI |
| | KYKNILRAAKEYNLNSFTVAEWLTKPELIGYRTYGKKGKIDQYHNKGRRKNYQTTEEKIFPAILTE |
| | EEFLVLNEMRKYNRAKYNKDIYTYLYSNLSYHSCGGKLEGERIKKKDSFVYYYKCNCCKKRFNQK |
| | KIETAIAENILNNPGLQIINDINFRLADIYDEIKNINNMIEEENSSEKRILSLVSKNVVGVEAAEEELLKI |
| | KKQKNFLKKLLEEKIKLIEEENKKEITEDHISLLKNLLEYSQEDDDDFRGKLKEIINLIVRKIEVSSLD |
| | KINIIF |
| 85 | MEKVAIYIRVSKKEQTRDKGSDSSLNLQLKKCLDYCKEKGYEVLKVYQDIESGRIDDRKEFNELFE |
| | AISKKIYTKIVFWEISRIARKISTGMKFFEELELYKITFDSISQPYLKDFMTLSIFLAWGTEDLKQMSL |
| | RIKSNLEEKTKAGYFVHGRPATGYIRGENKMIIPDPEKAPYILSIFETYAKNFNLTETARIFNKTRMDI |
| | VDIIDNKIYIGYVPLRKYVKELNQKNRTQVSKKDIKWYKGLHEPIVPLELFEFCQSIREKNIKSRVVY |
| | GDYKPYLLFSSMIYCECGDKMYQQKRNRSYKDNTKYAYYSYSCKNRKHRKSFSAKIMDKTIKEMI |
| | LNSKELEDLNNYNSNDIEKNEKKLLKLEKNLKVLENERERIINLFQKSYISEDELENRFKDLNARIKI |
| | AKEKKIEFEKNLNIPKNNDIKLLEKLKFIIENYDEEDVIETRKILKMLIKEIRVISFYPLKISILFY |
| 86 | MAQRKVTAIPATITKYTAVPIGSKRKRRVAGYARVSTDHEDQVTSYEAQVDYYTNYIKGRDDWEF |
| | VAIYTDEGISATNTKRREGFKAMVADALAGKIDLIVTKSVSRFARNTVDSLTTVRTLKEKGVEIYFE |
| | KENIWTLDAKGELLITIMSSLAQEESRSISENTTWGQRKRFADGKASVAYKRFLGYDRGPNGGFVV |
| | NQEQAKTVKLIYKLFLDGLTCHAIAKELTERKLPTPGGKAVWSQSTVRSILTNEKYKGDALLQKEF |
| | TVDFLQKKTKKNEGEVPQYYVEGNHEAIIDPATFDYVQAEMARRMKDKHRYSGVSMFSSKIKCGE |
| | CGCWYGSKVWHSTDKYRRVIYQCNHKYKGGKTCGTPHVTEKQVKGAFVRATNILLSERDELTAN |
| | TRMVIVMLCDSTELEKRQAELKEELEVVVGLVERCVAENARTALDQDEYTERYNGLVSRYETVKT |
| | RFDEVTQAIADKADRKKLLEQFLHTVETQEPVTQFDERLWSSLVDFVTVYSEKDIRVTFKDGTEIQ |
| | V |
| 87 | MPNLRKIEAAVPAIREKKKVAAYARVSMQSERMLHSLSAQVSYYSGLIQKNPDWEYAGVYADDFI |
| | SGTNTVKRDEFKRMLADCEAGKIDIILTKSISRFARNTVDLLETVRHLKDLGVEVQFEKERIRSMDG |
| | DGELMLTILASFAQEESRSISDNVKWGIRKRMQNGIPNGHFRIYGYRWEGDELVIVPEEAEVVKRIF |
| | RNFLDGKSRLETERELAAEGITTRDGCRWVDSNIKVVLTNVTYTGNLLLQKEFISDPISKQRKKNRG |
| | ELPQYYVEDTHPAIIDKATFDFVQEEMARRRELGALANKSLNTSCFTGKIKCPYCGQSYMHNKRTD |
| | RGDMEFWNCGSKKKKKKGTGCPVGGTINHKNMVKVCTEVLGLDEFDEAIFLEKVDHIDVPERYTL |
| | EFHMADGNVVTKDCLNTGHRDCWTPERRAEVSMKRRKNGTNPIGASCFTGKIKCVSCGCNFRKA |
| | TRNCKDGSKVSHWRCAEHNGCDSPSLREDLLEQMAAEVLGLDAFDAAAFREKIDRVEVLSSSELR |
| | FCFKDGRTVSRNWQPPERVGRPWTEEQRAKFKESIKGAYTPERRRQMSEHMKQLRKERGDKWRR |
| | EK |
| 88 | MTVGIYIRVSTEEQAREGFSISAQREKLKAYCISQDWQDYKFYVDEGKSAKDTNRPYLKLMLDHIQ |
| | QGLINVVLVYRLDRLTRSVKDLYKLLDLFDKNNCIFRSATEVYDTGSATGRLFITLVAAMAQWERE |
| | NLGERVTMGQVEKARQGQYSAPAPFGFKKQDETLVKDKKQGYILMDMIDKVKKGWSIRQIAKYL |
| | DQSYLPIRGYKWHIATILSILHNPALYGALRWKDELNETSHEGYLTKEEFEELQNILYSRQNFRKRQI |
| | ESAHIFQMKLVCPQCGNRLGCERSVYFRKKDQKNVESLHYRCQSCALNERPSISVSEKKLEKALLL |
| | FMKNVKFDLEPVVKEEKNETTEIQNAIVKIERQREKFQKAWASDLMTDEEFTARMSETRKAHENFT |
| | KRLSEIQRATPVPIDIKKAKKLVNEFKINWAYLNTEEKREFVQSFIEKIEFTKKDQNPHILNVSFY |
| 89 | MLKEVRCAIYTRKSNEDGLEQKFNSLDAQRVVCEKYIKSREGWVALAKKYDDGGFSGSNLNRPAI |
| | KELFEDVKVGEVDCVVVYTLDRLSRETKDCIEVTSFFRRHRISFVAVTQIFDNNTPMGKFVQTVLSG |
| | AAQLEREMIVERVKNKIATSKEQGLWMGGNPPLGYDVKEKELIINEKEAKIIKHIFERYMELKSMA |
| | ELARELNREGYRTKAKSDIFKKATVRRIITNPIYMGKIRHYEKQYKGKHEAIIEEEKWQKAQELISN |
| | QPYRKAKYEEALLKGIIKCKSCDVNMTLTYSKKENKRYRYYVCNNHLRGKNCESVNRTIVAGEIE |
| | KEVMKRAECLYGDGENLSFREQKEAMKKLIKGVMVKEDGIEVCSESEEKFIPMKKKGNKCIVIEPE |
| | GKTNNALLKAVVRAHSWKRQLEEGKYRSVKELSKKINVGTRRIQQILRLNYLAPKIKEDIVNGRQP |
| | RGLKLVDLKEIPMLWSEQREKFYGLDL |
| 90 | MKGESELDKKAAIYIRVSTQEQATEGYSIQAQTDRLTKYVEAKDFILYKKYIDAGYSASKLERPAM |
| | QELIQDVQSKKVDVVIVYKLDRLSRSQKDTMYLIEDIFRPNDVELISMQESFDTSTAFGSATVGMLS |
| | VFAQLERKSISERMITGRVERAKKGFYHTGGQDRPPAGYQFNSDNQLIINEYEAAAIKDLFRLYND |
| | GLGKSSISEYLKKNYPGKNKWLPSSIDRMLKNSLYIGKVKFSGAEYDGIHEPIIDEVTFYKTQKEIAR |
| | RKQSNTKRYNYVALLGGLCECGICGAKMANRRSVGRKGKVYRYYRCYSKKGSPKHMMKTDGCS |
| | SKAQQQFIIDEAVINNLKNIDVEAELKRRSAPQTNTSLISSQIESIDKQINKLIDLFQVDSMPLDVISEK |
| | IDKLNKEKQSMEKLLERKNRLDKTELQHRFDILKSFDWDNSSIESKRAVIEMLVQKVIIHDNSIEIILV |
| | E |
| 91 | MKGESELDKKAAIYIRVSTQEQATEGYSIQAQTDRLIKYVEAKDFILYKKYIDAGYSASKLERPAM |
| | QDLIQDVQSKKVDVVIVYKLDRLSRSQKDTMYLIEDIFRPNDVELISMQESFDTSTAFGSATVGMLS |
| | VFAQLERKSISERMITGRVERAKKGFYHTGGQDRPPAGYQFNSDNQLIINEYEAAAIKDLFRLYND |
| | GLGKSSISEYLKKNYPGKNKWLPSSIDRMLKNSLYIGKVKFSGAEYDGIHEPIIDEVTFYKTQKEIAR |
| | RKQTNTKRYNYVALLGGLCECGICGAKMANRRAVGRKGKVYRYYRCYSKKGSPKHMMKTDGCS |
| | SKAQQQFIIDEAVINNLKNIDVEAELKRRSAPQTNTSLISSQIESIDKQINKLIDLFQVDSMPLDVISEK |
| | IDKLNKEKQSMEKLLERKNKLDKTELQHRFDVLKSFDWDNSSIESKRVVIEMLVQKVIIHDNSIEIIL |
| | VE |
| 92 | MRTGLYVRVSTAEQEKHGYSIKVQLEKLRAFASAKDYTVVKEYIDAAQSGAKLERPGLKQLIEDV |
| | ENNALDCVLVYRLDRLSRSQKDTMYLIEDVFLKNSVAFVSLQESFDTTSSFGRAMIGMLSVFAQLE |
| | RDNITERLFSGRAHRAKRGFHHGGGIIPFGYRYDVETGELKRFENESNEVKAMFEMIANGKSVSSV |
| | AKEFNTYDTTIRRRIANSVYIGKIQFDGETFDGQHEPIISKELFDKANVRMNARASNLPFKRTYLLSG |
| | LIYCGKCGERCSAYESRSKHNGKEYRRAYYRCNARTWKYKQKHGRTCEQPHIRVDELEQAVMEQ |
| | VKRLPLKHKVKKRAFDFKPVENKIATIDKQKERLLDLYLNEHLDNEMFNKKSKELDKSRDKLAKQ |
| | LERMRMQAADSVESYQWLDGIDWDALDKDTLREVLERIIERIVIRDKDVEIYFK |
| 93 | MKGESELDKKAAIYIRVSTQEQATEGYSIQAQTDRLTKYVEAKDFILYKKYIDAGYSASKLERPAM |
| | QELIQDVKSKKVDVVIVYKLDRLSRSQKDTMYLIEDIFRPNDVELISMQESFDTSTAFGSATVGMLS |
| | VFAQLERKSISERMITGRVERAKKGFYHTGGQDRPPAGYQFNSDNQLIINEYEAAAIKDLFRLYND |
| | GLGKSSISEYLKKNYPGKNKWLPSSIDRMLKNSLYIGKVKFSGAEYDGIHEPIIDEVTFYKTQKEIAR |
| | RKQTNTKRYNYVALLGGLCECGICGAKMANRRAVGRKGKVYRYYRCYSKKGSPKHMMKTDGCS |
| | SKAQQQFIIDEAVINNLKNIDVEAELKRRSAPQTNTSLISSQIESIDKQINKLIDLFQVDSMPLDVISEK |
| | IDKLNKEKQSMEKLLERKNKLDKTELQHRFDVLKSFDWDNSSIESKRVVIEMLVQKVIIHDNSIEIIL |
| | VE |
| 94 | MTVGIYIRVSTEEQVKEGFSISAQKEKLKAYCTAQGWEDFKFYVDEGKSAKDMHRPLLQEMISHIK |
| | KGLIDTVLVYKLDRLTRSVVDLHNLLSIFDEFNCAFKSATEVYDTSSAMGRFFITIISSVAQ1-ERENT |
| | SERVSFGMAEKVRQGEYIPLAPFGYTKGTDGKLIVNKIEKEIFLQVVEMVSTGYSLRQTCEYLTNIG |
| | LKTRRSNDVWKVSTLIWMLKNPAVYGAIKWNNEIYENTHEPLIDKATFNKVAKILSIRSKSTTSRRG |
| | HVHHIFKNRLICPACGKRLSGLRTKYINKNKETFYNNNYRCATCKEHRRPAVQISEQKIEKAFIDYIS |
| | NYTLNKANISSKKLDNNLRKQEMIQKEIISLQRKREKFQKAWAADLMNDDEFSKLMIDTKMEIDA |
| | AEDRKKEYDVSLFVSPEDIAKRNNILRELKINWTSLSPTEKTDFISMFIEGIEYVKDDENKAVITKISF |
| | L |
| 95 | MKAAIYIRVSTQEQVENYSIQAQTEKLTALCRSKDWDVYDTFIDGGYSGSNMNRPALNEMLSKLH |
| | EIDAVVVYRLDRLSRSQKDTITLIEEYFLKNNVEFVSLSETLDTSSPFGRAMIGILSVFAQLERETIRD |
| | RMVMGKIKRIEAGLPLTTAKGRTFGYDVIDTKLYINEEEAKQLRLIYDIFEEEQSITFLQKRLKKLGF |
| | KVRTYNRYNNWLTNDLYCGYVSYKDKVHVKGIHEPIISEEQFYRVQEIFSRMGKNPNMNKESASL |
| | LNNLVVCSKCGLGFVHRRKDTVSRGKKYHYRYYSCKTYKHTHELEKCGNKIWRADKLEELIIDRV |
| | NNYSFASRNIDKEDELDSLNEKLKIEHAKKKRLFDLYINGSYEVSELDSMMNDIDAQINYYEAQIEA |
| | NEELKKNKKIQENLADLATVDFNSLEFREKQLYLKSLINKIYIDGEQVTIEWL |
| 96 | MRKVAIYSRVSTINQAEEGYSIQGQIEALTKYCEAMEWKIYKNYSDAGFSGGKLERPAITELIEDGK |
| | NNKFDTILVYKLDRLSRNVKDTLYLVKDVFTANNIHFVSLKENIDTSSAMGNLFLTLLSAIAEFERE |
| | QIKERMQFGVMNRAKSGKTTAWKTPPYGYRYNKDEKTLSVNELEAANVRQMFDMIISGCSIMSIT |
| | NYARDNFVGNTWTHVKVKRILENETYKGLVKYREQTFSGDHQAIIDEKTYNKAQIALAHRTDTKT |
| | NTRPFQGKYMLSHIAKCGYCGAPLKVCTGRAKNDGTRRQTYVCVNKTESLARRSVNNYNNQKIC |
| | NTGRYEKKHIEKYVIDVLYKLQHDKEYLKKIKKDDNIIDITPLKKEIEIIDKKINRLNDLYINDLIDLP |
| | KLKKDIEELNHLKDDYNKAIKLNYLDKKNEDSLGMLMDNIDIRKSSYDVQSRIVKQLIDRVEVTMD |
| | NIDIIFKF |
| 97 | MKVAVYCRVSTLEQKEHGHSIEEQERKLKSFCDINDWTVYDTYIDAGYSGAKRDRPELQRLMNDI |
| | NKFDLVLVYKLDRLTRNVRDLLDLLEIFEKNDVSFRSATEVYDTTTAMGRLFVTLVGAMAEWERE |
| | TIRERTQMGKLAALRKGIMLTTPPFYYDRVDNKFVPNKYKDVILWAYDEAMKGQSAKAIARKLN |
| | NSDIPPPNNTQWQGRTITHALRNPFTRGHFDWGGVHIENNHEPIITDEMYEKVKDRLNERVNTKKV |
| | RHTSIFRGKLVCPVCNARLTLNSHKKKSNSGYIFVKQYYCNNCKVTPNLKPVYIKEKEVIKVFYNY |
| | LKRFDLEKYEVTQKQNEPEITIDINKVMEQRKRYHKLYASGLMQEDELFDLIKETDQTIAEYEKQN |
| | ENREVKQYDIEDIKQYKDLLLEMWDISSDEDKEDFIKMAIKNIYFEYIIGTGNTSRKRNSLKITSIEFY |
| 98 | MKVAIYTRVSTLEQREKGHSIDEQERKLRSFCDINDWTVKDVYVDAGFSGAKRDRPELTRLLDDIS |
| | EFDLVLVYKLDRLTRSVRDLLDLLEVFENNNVAFRSATEVYDTTTAIGRLFVTLVGAMAEWERETI |
| | RERSLMGKRAAIKKGMILTAPPFYYDRVNNTYIPNQYKDVVLDVYNKVKKGYSIAHIARLYNNSD |
| | VKPPNGNEEWTTRMLMHALRNPVTRGHYQWGEIYIEDSHEPIITDEMYNTIIDRLDKHTNTKVVAH |
| | TSVFRGKLICPNCGYALTLNSQKRKRKNDTIVYKTYYCNNCKITKGMKPHHITETETLRVFKDHLS |
| | KIDLKQYETQEKEKQSHVTIDLSKVMEQRKRYHKLYASGMMQENELFELIKETDEMIEEYEKQRK |
| | QVDVKEFDICKIKEIKDVLLKSWDIFTLEDKADFIQMSIKAINIEYTKLKRGKSSNSMKIKDIEFY |
| 99 | MPKVSVIPAKQVQVINGIKDKKKKRVCAYCRVSTDTDEQLTSYEAQVTYYESYIRGKPEYEFAGIF |
| | ADEGITGTNTKHRTEFKRMIDEALAGKFDMIITKSISRFARNTLDCLKYVRLLRDKGIGVYFEKENID |
| | TLDSKGEVLLTILSSLAQDESRNISENSRWGIVRRFQQGKVRVNHKRFLGYDKDENGELIIDEEQAKI |
| | VRRIYKEYLEGKGIRAIGKDLERDNILTGAGGRKWHDSTIQKILRNEKYSGDALLQKTITTDFLTHK |
| | RVKNKGEVQQYYVEDSHPAIISKEMFRMVQEEIKRRASLIGYSEKTKSRYTNKYAFSGRIVCGNCG |
| | SKFRRKRWGPGEKYKKYVWLCANHIDNGLKACSMKAVSEEKLKAAFVRSINKIIENKEAFIKTMM |
| | ENISRVSESKEDRSELKIINESLEELKEQMMNLVRLNVRSSLDNQIYDEEYERLEEEIKQLKEKKAGF |
| | DNTELIKKEGIQEVKEIERILRDRQDIIKDFDRELFMQIVDKVKVISLVEVEFIYKSGVVVKEIL |
| 100 | MKVAIYVRVSTDEQAKEGFSIPAQRERLRAFCASQGWEIVQEYIEEGWSAKDLDRPQMQRLLKDIK |
| | KGNIDIVLVYRLDRLTRSVLDLYLLLQTFEKYNVAFRSATEVYDTSTAMGRLFITLVAALAQWERE |
| | NLAERVKFGIEQMIDEGKKPGGHSPYGYKFDKDFNCTIIEEEADVVRMIYRMYCDGYGYRSIADRL |
| | NELMVKPRIAKEWNHNSVRDILTNDIYIGTYRWGDKVVPNNHPPIISETLFKKAQKEKEKRGVDRK |
| | RVGKFLFTGLLQCGNCGGHKMQGHFDKREQKTYYRCTKCHRITNEKNILEPLLDEIQLLITSKEYF |
| | MSKFSDRYDQQEVVDVSALTKELEKIKRQKEKWYDLYMDDRNPIPKEELFAKINELNKKEEEIYSK |
| | LSEVEEDKEPVEEKYNRLSKMIDFKQQFEQANDFTKKELLFSIFEKIVIYREKGKLKKITLDYTLK |
| 101 | MELSRNITVIPARKRVGNTAAAEQRPKLKVAAYCRVSTDSEEQASSYEVQVAHYTQFIQKNPEWEL |
| | AGIYADDGITGTNTKKREEFNRMIQDCMDGNIDMIITKSISRFARNTLDCLKYIRELKEKNIPVFFEK |
| | ENINTMDSKGEVLLTIMASLAQQESQSLSQNIKLGLQYRFQNGEVRVNHSRFLGYTKDEEGNLIIEP |
| | AEAEVVKRIYREYLEGASLLQIGRGLEADGILTGAGKTKWRPETLKKILQNEKYIGDALLQKTYTID |
| | FLSKKRVKNNGIVPQYYVENSHEPIIPRELFMQVQEEMVRRANLRGGKGGKKRVYSSKYALSSIVY |
| | CGQCGDIYRRVHWNNRGYKSIVWRCVSRLEEKGSECTAPTINEETLQAAVVKAINELLTKKEPFLS |
| | TLQKNIATVLNEENDNTTDDIDRKLEELQQQLLIQAKSKNDYEDVADEIYRLRELKQNALVENAER |
| | EGKRQRIAEMTDFLNEQSCELEEYDEQLVRRLIEKVTVFDEKMTIEFKSGVTIEGRI |
| 102 | MSVKKIRVNKQKNKQRICAYIRVSTTNGSQLESLENQKQYFINLYSNRDDIDFVGVYHDRGISGSK |
| | DNRPNFQAMIENCRKGMIDVIHTKSIARFARNTVTVLEISRELKAIGVDIFFEEQNIHTLSSEGEVML |
| | SVLASIAEDELRSMSGNQRWAFQKKFQRGELVINTKRFLGYDLDENGELIINPEEALIVRQIFALYLE |
| | GYGTHRIAKLLNEKGVATVTGAKWHDTTIRQMLSNEKYNGSVLLQKYFHDGVNGPKKLNQGELE |
| | QYFIEDNHEAIISMEDWQTVQAKLNRRRWQQGRNKTYKFTGLLKCQHCGSTLKRQVSYKKKIVW |
| | CCSKYIKEGKAACQGMRVPEVDISNWTVTSPVKVIERDRDGEKYYSYSSQESADQYSSSGQEENQS |
| | SRILSSVHRPRRTAIKL |
| 103 | MKPRQWAAENTEEKPKLKVAAYCRVSTEMEEQASSYEAQVQHYTDYIQRNPDWELAGIFADEGIS |
| | GTGTKKRDGFNRMIEACQKGDVEYIITKSISRFARNTVDCLQYIRQLKDLHIAVFFEKENINTMDAK |
| | GEVLLTIMASLAQQESQSLSQNTKMGVQYRFQQGQLRINHNHFLGYTKDEDGNLVIEPKEAEVIKR |
| | IFREYLEGSSLQEIANGLMSDGILTGGKRKLWRGEGVRLILRNEKYMGDALLQKTYTTDFLTKKRV |
| | KNDGSYAQQYYVENSHPAIIPRDIFMQVQQELDRRKSMKNKHSQCFSGKYALSGITVCGDCGNAY |
| | RRVHWKNRGTVWRCKSRVDKREHNCSGRTIYEKDLHEAIIKAINETVVDREDFLQQLSENINSVLT |
| | DGLTGRLEELDSKLKELESEIISMAIGGQGYDELASQIFSLRDERDAVAKQIAANTNLQQRVDEMVV |
| | FVKEHDVINEYSEVLVRRLIEKVTIFEKNIVVDFKSGVRVTVEI |
| 104 | MKAAIYIRVSTQEQIENYSIQAQTEKLTALCRSKDWDVYDIFIDGGYSGSNMNRPALNEMLSKLHEI |
| | DAVVVYRLDRLSRSQRDTITLIEEYFLKNNVEFVSLSETLDTSSPFGRAMIGILSVFAQLERETIRDR |
| | MVMGKIKRIEAGLPLTTAKGRTFGYDVIDTKLYINEEEAKQLQMIYDIFEEEKSITTLQKRLKKLGF |
| | KVKSYSSYNNWLTNDLYCGYVSYADKVHTKGVHEPIISEEQFYRVQEIFSRMGKNPNMNRDSASL |
| | LNNLVVCGKCGLGFVHRRKDTISRGKKYHYRYYSCKTYKHTHELEKCGNKIWRADKLEELIIDRV |
| | NNYSFASRNVDKEDELDNLNEKLKTEHKKKKRLFDLYISGSYEVSELDAMMADIDAQINYYEAQIE |
| | ANEELKKNKKIQENLADLATVDFDSLEFREKQLYLKSLINKIYIDGEQVTIEWL |
| 105 | MPTRIILPKPEESKKKRTAAYCRVSSSSEEQLHSLAAQTSYYENFFASAKDAEFAGIYADSGLSGTRT |
| | KNRTEFLRLIEDCRAGMVDAIITKSVSRFGRNTVDTLVFTRELRNLGIDVEFEKEDLHSCSPEGELLL |
| | TLMAAMAESEVVSMSDNIKWGKRKRFEKGMIESLALNNIYGFRKTADGIDIFETEACVVRHIYELF |
| | LSGLGYAEIAKRLNAENAPTRRDGSVWESTTVKNIITNEKNCGNCLFQKTFIRDPLSHKSRPNKGEL |
| | PQFLVEDCLPSIIDKETWLIAQRMRERNHRNGSSVPSEEYPFAGMLFCGICGAPVGFYYSKGEGFVM |
| | KTVYRCSSRKTRTAKAVEGVTYTPPHKSNYTKNPSPGLIEYREKYSGQYLQPRPMICTDIRIPLDRP |
| | QKAFVQAWNYIVGQRGRYHATLKRTVENNDDVLVRYRAREMLELFDGVGRLNTFDFPLMLRTLD |
| | RVETTKDEKLTFIFQSGIRITI |
| 106 | MSNKNVTVIPAKPTGFMQGLPGLITKRKVAGYARVSTDKDEQQNSYEAQVEYYTDYIKRNPEWEF |
| | VEVYTDEGISGTSTKHREGFKRMIADALDGKIDLILTKSVSRFARNTVDSLTTIRQLKDKGTEVYIAL |
| | KENIFTMDSKGELLLTIMSSLAQEESRSISKNITWGKRKSMADGKVSFAYSSFLGYDMGADGHLYI |
| | VEDQAKIVHRIYDEFLAGKTTYDIAVRLTEDGIPTPMNKVKWQASTVSNILQNVKYRGDSILQQYF |
| | VEDFLTKKIKKNTGELPLYYVSQNHPPIIPPEKFLMVQEEFRRRKEGGPYTCISPFSGRIVCGNCGGF |
| | YGRKVWHSGSSYQSFVWHCNNKFTKRKYCSTPSVKEDAIMKCFVDAFNNLIARKDEIARNYEECL |
| | AAITDDSAYKTRLAEVENLSAGLATRMHDNLTRESRMMDDCGEDSPIKKERDEITVEYEALQKEH |
| | KELNSKIALCAAKKVQVRGFLQLLKKQKKALVEFDPLVWQAAVHYMVINEDCTVKFVFRDGTEL |
| | PWVIDPGVKSYKKRKTVESCPQE |
| 107 | MEKQIIDITPTRTAFAVKQRVAAYARVSCDKDTMLHSLAAQIDYYRKYITRNPEWMFVGVYADEA |
| | KTGTKDDREQFQKLLSDCRSGLIDMVVTKSISRFARNTVTLLGTVRELKEIGINVFFEEQNINSISEE |
| | GELMLTLLASQAQEESLSCSENCKWKIRKGFERGQPNTCTMLGYRLVNGEITLVPDEAEIVKEIFDL |
| | YLSGCGVQKIANTLNKRSVRTEKIPFWHLDTIRGILRNEKYMGDLLLQKSLSESHLTKRQVKNEGQ |
| | LQQFYINDDHEPIVSRTVFAETQSEVQRRAEKHKCKAGTKSVFTGKIRCGICGKNYRRKTTPHNIV |
| | WCCSTFNTRGKAFCASKAIPENTLKDCISHALGSKYFTEDFFTETVDFIVAEPCNTMRLIFKNGTEK |
| | RITWQDRSRSESWTDEMREAVRQRMLERDGQKNEQ |
| 108 | MTPAQAPATFQGSHVDTDGEPWLGYIRVSTWKEEKISPELQETALRAWAARTGRRLLEPLIIDLDA |
| | TGRNFKRRIMGGIQRVEAGEARGIAVWKFSRFGRNNLGIAVNLARLEHAGGQLASATEDIDVRTAV |
| | GRFNRRILFDLAVFESDRAGEQWKETHQWRRAHGVPATGGRRLGYTWHPRRIPHPTLIGQWATQR |
| | EWYEVEESARTHIERLYARKIGTDLRAPEGYGSLSAWLNSLGYRTGNGNPWRADSVRRYMLSGFA |
| | AGLLRIHDLECRCDYTANGGQCIRWTHIDGAHEAIITPETWERYVAHVAERRRMAPRVRNPTYPLT |
| | GLIRCGGCREGAAATSARRAAGQILGYAYACGQSRSGLCDSPVWVQRAIVEDELLLWISREVAAE |
| | VDAAPPTGIPQQRDDGTERTQAERARLEGEHTRLTNALTNLAVDRATNPEKYPDGIFEAAREQILQ |
| | QKRAVSEALEAHTMVAALPQRSTLIPLAVGLLDEWDTFHPPETNGILRSLLRRVVITRGAAGRKGV |
| | RGSAQTKIEFHPAWEPDPWEGLE |
| 109 | MKVAIYLRVSTQEQVDNYSIEAQRERLEAFCKAKGWTVYDVYVDAGFTGSNTDRPGLQRLLMEL |
| | DKVDVVAVYKLDRLSRSQRDTLTLIEDHFLKNKVDFVSLTEALDTSTPFGKAMIGILAVFAQLERET |
| | IAERMRLGHIKRAEEGLRGMGGDYDPAGYKRQDGRLVLVPEEAQHIQEAFNLYEQYLSITKVQKR |
| | LKELNYPVWRFRRYRDILSNKLYCGYVQFADKHYKGQHESIITEEQFDRVQILLSRHKGRNAFKAK |
| | EALLTGLAVCGECGESYVSYHCRAKGKHYRYYTCRARRFPSEYPEKCHNKNWRSEAIEKFIQDAL |
| | YTIADEKETSEREFVAIDYGTQLKKIDQKLERLVDLYADGSIEKSVLDKQVTKLNNEKRDIAEQQA |
| | AQTERAARSVNRKQLQDYAIVLESAAFPDRQAIVQKLIRRLAIHKDRLEIEWNF |
| 110 | MRICMYLRKSRADEELEKTLGEGETLSKHRKALLKFAKEKNLNIVEIKEEIVSGESLFFRPKMLELL |
| | KEIENKQYSGVLVMDMQRLGRGNMQDQGIILETFKKSNTKIITPMKTYDLSNDFDEEYSEFEAFMS |
| | RKELKMINRRMQGGRVRSVEDGNYIATNAPYGYDIHWINKARTLKPNQKESEIVKLIFKLYIEGNG |
| | AGTIAKHLNSLGYKTKFENSFNNSSIIFILKNPVYIGKITWKKKDIRKSKDPNKIKDTRTRDKSEWIV |
| | VDGKHDPIIDQITWKQAQEILNNRYHIPYKLVNGPANPLAGLIICATCKSKMVMRKLRGTDRILCKN |
| | NKCNNISNRFDAVEKSVVESLENYLKAYKVNLPELNEISNLKLYEQQISTLKKELKILNEQRLKLFD |
| | FLERGIYDEDTFLKRSKNLDERIEITNESLSNLNQIIAKENKAIKKEDIIKFEKVLDSYKSTADIRLKNE |
| | LMKTLIFKIEYTKNKKGNDFKIKVFPKLKPLNI |
| 111 | MKCVIYRRVSTDMQVEEGISLDMQKLRLEQYAKSQGWVVVNDYCDEGYSAKNTERPAFQKMIKD |
| | MKKKQFDIILVYRLDRFTRSVSDLHSILKIMDEYNVKFKSSTEIFDTTTATGRMFITLVATLAQWER |
| | ETTAERVRDSMHKKAELGLRNGAKSPMGYDLNKGNLYINHTEAEIVKYIFEMFKTKGIISIVKSLNS |
| | RGVKTKRGKIFNYDAVRYIINNPIYIGKIRWGDDILTDIAQKDFETFIDKDTWYTVQQVQDSRKRGK |
| | VRLHNFFVFSNVLKCARCGKHFLGNKQVRSHNRIVMSYRCSSRHHKGTCDMPQVPEDVIEKEFLN |
| | LLEDAIVDLDDTEEKPIELSNLQEQYNRIQDKKARLKYLFIEGDIPKNEYKKDMLTLTQEENIIQKQL |
| | ANITDTASSLEIKELLNQLKDEWYNLNNESKKAAVNAIVSSITVEVTKPARVGKNPIAPVIKVTDFKI |
| | K |
| 112 | MKTAIYLRKSRADLEAEARGEGETLAKHRSTLLKIAKEMNLNVLAVREEIVSGESLVKRPEMLALL |
| | EEIEDNKYDAVLCMDMDRLGRGGMKEQGIILETFKRSNTKIMTPRKTYDLNDEWDEEYSEFEAFM |
| | ARKELKIITRRMQRGRVASVEAGNYLGTHAPFGYDIHRLNKRERTLTINSEEASVVRMIFDWYANE |
| | EMGANAIRSKLNDLGYKSKLGNEWNPYSILDILKNNVYIGKVTWQKRKEVKRPDAVKRSCARQD |
| | KSDWIIADGKHEPIISESLFEQVQDKLNSRYHVPYNTNGIKNPLAGIIKCGKCGYSMVQRYPKNRKE |
| | AMDCKHRGCENKSSYTELIEKRLLEALKEWYVNYKADFEKHKQDDKLKETQVIQMNEVALRKLE |
| | KELVDVQKQKNNLHDLLERGVYTVDMFLERSNVISDRINEITSTMEKLQNEIKTEIKKEKVKKDTIP |
| | QVEHVLDLYFKTDDPKKKNSLLKSVLEKAVYKKEKWQRLDDFELVLYPKLPQDGDI |
| 113 | MASHSSWEIHPDLAAALASGKTVEEWLDGRTPVVSYARISVDLQKVKAIGVARQHGMHCDPAAK |
| | EQGWAVVYRYTDNDLTAADPDVQRPAFLQMVRDLRARQTAEGIAIRGILAVEEERVVRLPEDYLK |
| | LYRALTVEEDAVLYYTDKRQLVDVYAEVEQTRGLMSSSMGETEVRKVKRRAKRSTKDRAAEGKY |
| | TGGARRFGWLGADKDLGRTQNEKLDPDESVWLRNMIDMKLCGKGWHTIAVWLISESIATVRGGE |
| | WTSTGVKSLLTNPAICGYRILNGELVLDPGTGEPKVGNWETIATPEEWHQICEMAWPGGKLAKTK |
| | KPKGTKRARKHLSTGILRCGWIPKSGPKEDMCLHSMVGRPPHGNHKWGNYVCNGTDCRKVSRRM |
| | DKIDRIVEGIVVRTLKDQFATLAPEEKTWHGQHTLERLTARRQELKAAYKAEHISMADYLEFIDPL |
| | DAQIKESQADRDAFYAEQAAKNFLAGFTEERWHDFDLEQKQTAIGTVLQAVIVHPLPEGRSRKAPF |
| | DPSLIEIVFKNPH |
| 114 | MAKELTKTASVAAYLRKSREDADQDDTLARHRKQLIDLVKQRGFENVDWYEEIGSADSIKNRPVF |
| | SDLLKKIENDEYDAVCVVAYDRLSRGNQIESGIISKAFKDTETLLITPTRTYDWSIEGDEMLSEFESM |
| | IARSEYRVIKKRLKQGKINAVKNGRLHSGNVPYGYKWDKNDKTAKIDKEKHEIYRLMVKWFLDEE |
| | YSATEIADKLNELGIPSPSGGSTWYSEVVADILTNDFHRGLVWYGKYRARKNGIGIEKNPDSSSIIM |
| | HKGNHEPMKSDEEHGAIIRRISKLRTFKPGRKLNKNTFKLSGLVRCPHCGKVQVVHTPKNRNPHVR |
| | KCLKKSKTRTTECNNTTGIPEEALYKAIVMKIREYNEVLFSKDSSEKKDEEARTYMNQILSLHEKAI |
| | SKSNKRIEKIKEMYMDEIIDKDEFKSRIDKEKKSILEAENEIRTLKESADYHDEIEHEQRKIKWNHEK |
| | VQEFIESDQGFTPSEINLILKLIISHVSYTMVKNEYGEFDVDLRVNFN |
| 115 | MGKNGARVYSYLRFSDPRQATGSSADRQLAYASAWASKHGMELDATLTLRDEGLSAYHETHVK |
| | QGALGAFLRAVDEGRIPAGSVLIVEGLDRLSRAEPLLAQAQLGQIVNAGITVVTASDGREYNREGL |
| | KAEPMNLVYSLLVMIRAHEESDTKSKRVKAAVRRQCEAWVTGSYRGRIVSGKDPQWLAWDGDS |
| | WQFIPERVEAVRFALDAYRSGIGAARLVRLMHEKGMVLSDWGIAAQQVYRLVRLPALRGAKRISI |
| | DGEDFMLEDYYPRLLSDEEFSELETLVGQRYRRRGKDEIVGIVTGIGITRCGYCGTALVAQNLMQR |
| | VKADGSLEDGHRRLHCVSYSKNGGCNGGSCSSVPIERAVLAYCSDQMNLQRLLEPSSAGEDLRPR |
| | LVEAQKGVAEIERQLERVTDALLADDSGAAPLAFVRKARELEEDLERRRSAVQALEQELVAKSAS |
| | APAAGASKWAELAERAKSMADAEAREQARQLVMDTFETLVVYMRGVIPNPKGRYIDVMMKSRA |
| | GQTRWIRVDRRTGVWKEGADRPTTRRP |
| 116 | MSIAIYLRKSRADEEAEKQGEFETLSRHKSTLLKLAKEQNLDVIEIKEELVSGESIIHRPKMLELLKE |
| | VEENKYDAVLVMDLDRLGRGDMKDQGIILETFKESKTKIITPRKTYDLTDEFDEEYSEFEAFMARK |
| | ELKLISRRMQRGRVKSVEEGNFIGTSAPFGYDAVTTGRKERILVPNKDADIVRTIFDLYINEDMGCS |
| | KISKYLNNLGIKTATGANWYNSAITNIIKNKVYCGYIQWQKKDYKKSKNPNKIKTVKLRPKDEWIE |
| | AKGKHEPLISEITWKKAQNILKKNGHVSYGNQIKNPLAGIVICKNCGRPLVYRPYADHDYIICYHPG |
| | CNKSSRFEFIEAAILKSLEDTVKKYQLKASDIDLDKNNKGSNIEFQKRVLKGLETELKELSKQKNKL |
| | YDLLERGIYDEDTFIERSNNISSRTEEIKDSIKTVKNKLNSVKKDNAKIIEDIKTVLSLYHDSDSLGKN |
| | KLLKSVIDKAIYYKSKEQKLDSFELMVHLKLHEDQ |
| 117 | MKVPVWCYARISTLKQIDGFGIQRQINTINQFLQYVVLDHRLPFTLDVDNVTQMVAEGKSAFRGK |
| | NWNEKTKLGQYRKMVMDGVINDSVLIVENIDRLTRLDTFQAVEIISGLVNRGTTILEIETGMTYSRY |
| | IPESITVLVMQCNRANGESKRKSIMMQKSHANRYGKVSKVRPRWFDVVEIDGIKQYRPNETAKAIQ |
| | RMYNDYINGIGAAHIVRTYGNTDNGKAWTLVTVLRALSDKRVADDARYPPIIDKELYDSVQALKA |
| | ATNKKGNTHQKNMLNIFSGMSRCPVCNQSIIVKRNSHGNLFTVCLGKRTNKTCEARSISYFALERPL |
| | LTAISGLDFSEVYKHEDKNVLTLRDQWIQNERDIAAFRERLNKASRHEKFAILDELEIMNREQEELTI |
| | RLKSVDVPKDIQLTFDDDKLDLDTNYRIELNNRIKKLIQHINIVREDVSKSSYTIYCTIKYWTDVISHL |
| | VIIDVNIKRTGTGGTNTLTTTLRSVSSLNMDGTVSGNPDSDAWEYWKSFLDGTIGLVDYKK |
| 118 | MRKVAIYSRVTTINQAEEGYSIQGQIEALTKYCEAMEWKIYKNYSDAGFSGGKLERPAITELIEDGK |
| | NNKFDTILVYKLDRLSRNVKDTLYLVKDVFTANNIHFVSLKENIDTSSAMGNLFLTLLSAIAEFERE |
| | QIKERMQFGVMNRAKSGKTTAWKTPPYGYRYNKDEKTLSVNELEAANVRQMFDMIISGCSIMSIT |
| | NYARDNFVGNTWTHVKVKRILENETYKGLVKYREQTFSGDHQAIIDEKTYNKAQIALAHRTDTKT |
| | NTRPFQGKYMLSHIAKCGYCGAPLKVCTGRAKNDGTRRQTYVCVNKTESLARRSVNNYNNQKIC |
| | NTGRYEKKHIEKYVIDVLYKLQHDKEYLKKIKKDDNIIDITPLKKEIEIIDKKINRLNDLYINDLIDLP |
| | KLKKDIEELNHLKDDYNKAIKLNYLDKKNEDSLGMLMDNLDIRKSSYDVQSRIVKQLIDRVEVTM |
| | DNIDIIFKF |
| 119 | MGKNGARVYSYLRFSDPRQATGSSADRQLAYASAWASKHGMELDATLTLRDEGLSAYHETHVK |
| | QGALGAFLRAVDEGRIPAGSVLIVEGLDRLSRAEPLLAQAQLGQIVNAGITVVTASDGREYNREGL |
| | KAEPMNLVYSLLVMIRAHEESDTKSKRVKAAVRRQCEAWVAGSYRGRIVSGKDPQWLAWDGDS |
| | WQFIPERVEAVRFALDAYRSGIGAARLVRLMHEKGMVLSDWGIAAQQVYRLVRLPALRGAKRISI |
| | DGEDFMLEDYYPRLLSDEEFSELETLVGQRYRRRGKDEIVGIVTGIGITRCGYCGTALVAQNLMQR |
| | VKADGSLEDGHRRLHCVSYSKNGGCNGGSCSSVPIERAVLAYCSDQMNLQRLLEPSSAGEDLRPR |
| | LVEAQKGVAEIERQLERVTDALLADDSGAAPLAFVRKARELEEDLERRRSAVRALEQELVAKSAS |
| | APAAGASKWAELAERAKSMADVAAREQARQLVMDTFETLVVYMRGVIPNPKGRYIDVMMKSRA |
| | GQTRWIRVDRRTGVWKEGADRPTTRRP |
| 120 | MQSPKVYSYFRFSDPRQAAGSSADRQLAYASAWASKHGMELDATLTLRDEGLSAYHETHVKQGA |
| | LGAFLRAVDEGRIPAGSVLIVEGLDRLSRAEPLLAQAQLGQIVNAGITVVTASDGREYNREGLKAEP |
| | MNLVYSLLVMIRAHEESDTKSKRVKAAVRRQCEAWVAGSYRGRIVSGKDPQWLTWGGDSWQFIP |
| | ERVEAVRFALDAYRSGIGAARLVRLMHEKGMVLSDWGIAAQQVYRLVRLPALRGAKRISIDGEDF |
| | MLEDYYPRLLSDEEFSELETLVGQRYRRRGKDEIVGIVTGIGITRCGYCGTALVAQNLMQRVKADG |
| | SLADGHRRLHCVSYSKNGGCNAGSCSSVPIEHAVLAYCSDQMNLQRLLEPSSADEELRPRLAEAQQ |
| | RVAEVERQLQRVTDALVADDSGAAPLSFVRKARELEEELERRRSAVRVLERELVAMASSVPVAEA |
| | SKWAELAEQAKSVSNVEAREQARQLVMDTFERIVVYMRGVVPEGRRSKYIDVLLVSRAGQSRWL |
| | RVGRRTGTWSAGGDWNGSAP |
| 121 | MKAAIYIRVSTQEQIENYSIQAQTEKLTALCLSKDWDVYDIFIDGGYSGSNMNRPALNEMLSKLHEI |
| | DAVVVYRLDRLSRSQRDTITLIEEYFLKNNVEFVSLSETLDTSSPFGRAMIGILSVFAQLERETIRDR |
| | MVMGKIKRIEAGLPLTTAKGRTFGYDVIDTKLYINEEEAKQLRLIYDIFEEEQSITFLQKRLKKLGFK |
| | VRTYNRYNNWLTNDLYCGYVSYKDKVHVKGIHEPIISEEQFYRVQEIFSRMGKNPNMNKESASLL |
| | NNLVVCSKCRLGFVHRRKDTVSRGKKYHYRYYSCKTYKHTHELEKCGNKIWRADKLEELIIDRVN |
| | NYSFASRNIDKEDELDSLNEKLKIEHAKKKRLFDLYINGSYEVSELDSMMNDIDAQINYYEARIEAN |
| | EELKKNKKIQENLADLATVDFNSLEFREKQLYLKSLINKIYIDGEQVTIEWL |
| 122 | MSVKKIRVNRQKHRKRVCAYIRVSTTNGSQLDSLENQKQYFENLYSNRDDIDFMGVYQDRGISGS |
| | KDKRPDFQAMIEECRKGKIDVIHTKSIARFARNTVTVLEISRELKAIGVDIFFEEQNIHTLSSEGEVML |
| | SVLASIAEDELRSMSGNQRWAFQKKFQRGELVINTKRFLGYDVDENGELIINPEEALIVRQIFALYLE |
| | GYGTHRIAKLLNEKGVATVTGAKWHDTTIRQMLSNEKYKGSVLLQKYFHDGVNGPKKLNQGELE |
| | QYLIEDNHEAIISKEDWQAVQDKLNSRRWQQGRNKTYKFTGLLKCQHCGSTLKRQVSYKKKIVW |
| | CCSKYIKEGKVACRGMRVPEVDIPNWEITSPITVLERDRNGEKYYSYSGQESEDQRSSSGQEENQGS |
| | RILSSVHRPRRTAIKL |
| 123 | MKTKLYSYIRFSSMRQNDGSSYERQIRMAREIAVKYDLELVNDYQDLGVSAFKGANSKTGALSRF |
| | LDAIGRSVPVGSWLFIENLDRLSRADIVSAQELFLSIIRRGITIVTGMDNKIYSLDTVTANPMDLMFSI |
| | LLFIRGNEESQTKRNRTNSSALIKIKAHQENPQNPAVAIEEIGKNMWWTDTTSGYVLPHPVFFPIVQ |
| | EVVELRRNGRSTAEILDHLNATYTPPPAASHKRHSNWSRAMIERLFHTRALIGIKEISVDGVKYELK |
| | DYYPRVLDDAEFYHLKKSIGVRACNFGDKEEAKPIPLLSGVGLLKCEHCGSAMVKVKGTNRRPNQ |
| | YRYSCDAMRSSRIECVHTNWSFRGDQLEKAVLQLLADKIWIAEDKANPVPALKVQIDEISRKIDNLI |
| | TLSAMTGATKELADQITTLNSERETLYNQLKMAEEEMYSVDSQGWEKLAEFDLEDVYNEDRIKVR |
| | FKIKQALKRIGCSRIDKYKNLFVLEYIDGKTQRVVIENSRGPRKGRIFVDLKTINDRQILESNGLVLH |
| | PCLDMLTDKNWKPEEEIPGPLQEFGI |
| 124 | MSVKKIRVNRQKHRKRVCAYIRVSTTNGSQLDSLENQKQYFENLYSNRDDIDFIGVYHDRGISGSK |
| | DNRPNFQAMIEDCRRGKIDVIHTKSIARFARNTVTVLEISRELKAIGVDIFFEEQNIHTLSSEGEVMLS |
| | VLASIAEDELRSMSGNQRWAFQKKFQRGELVINTKRFLGYDVDENGELIINPEEALIVRQIFALYLE |
| | GYGTHRIAKLLNEKGVATVTGAKWHDTTIRQMLSNEKYNGSVLLQKYFHDGVNGPKKLNQGELE |
| | QYFIEDNHEPIISMEDWQTVQEKLNSRRWQQGRNKTYKFTGLLKCQHCGSTLKRQVSYKKKIVWC |
| | CSKYIKEGKAACQGMRVPEVDISNWTVTSPVKVIERDRDGEKYYSYSCQESAEQRSTSGQKENQCS |
| | RILPSVHRSRRTAIKL |
| 125 | MKGESKLDKKAAIYIRVSTQEQATEGYSIQAQTDRLTKYVEAKDFILYKKYIDAGYSASKLERPAM |
| | QELIQDVQSKKVDVVIVYKLDRLSRSQKDTMYLIEDIFRPNDVELISMQESFDTSTAFGSATVGMLS |
| | VFAQLERKSISERMITGRVERAKKGFYHTGGQDRPPAGYQFNSDNQLIINEYEAAAIKDLFRLYND |
| | GLGKSSISEYLKKNYPGKNKWLPSSIDRMLKNSLYIGKVKFSGAEYDGIHEPIIDEVTFYKTQKEIAR |
| | RKQTNTKRYNYVALLGGLCECGICGAKMANRRAVGRKGKVYRYYRCYSKKGSPKHMMKTDGCS |
| | SKAQQQFIIDEAVINNLKNIDVEAELKRRSAPQTNTSLISSQIESIDKQINKLIDLFQVDSMPLDVISEK |
| | IDKLNKEKQSMEKLLERKNKLDKTELQHRFDVLKSFDWDNSSIESKRVVIEMLVQKVIIHDNSIEIIL |
| | VE |
| 126 | MKRVALYIRVSTEEQVLHGDSIRTQTEALEQYSKDNNFIIVDKYIDEGYSATNLKRPNLKRMIEDVK |
| | NNKIDLVMITKIDRLSRGVKNYYKIMETLEKHKCDWKTILEDYDSSTAAGRLHINIMLSVAENEAA |
| | QTSERIKFVFQDKLKRGEVITGSVPFGYKIKDKHLVIKEDEASIVREAFDAYQDFSSLAKTIQHINTK |
| | FSTKYMFKWMPKMLKNKIYIGIYEKGDLVVENYCEPIISREQFNFVQTLLKKNIRFSENKFKMNYLF |
| | SGMIVCGSCGRKMGGVHSRGGANRHYLYYRCPLSFATKLCDNKPYLNEKKVEAFLLENVKKELQ |
| | KTILEHESNNKKRQKKNNNKNLRNKLEKQIEKLQDLYFDDLINKDTYKFKYKKLNDDLSELNKAE |
| | NEAESVEKDLKSMKIFLDTNIALDNYYDMNYSEKRTLWTSAIDRIEVQKNGELVIKFL |
| 127 | MRKVTRIDGNNALQAFKPKVRVAAYCRVSTDSDEQMASLEAQKDHYESYIKANPDWEFAGIYYD |
| | EGISGTKKENRTGLLRLLADCENKKIDFIITKSVSRFARNTTDCIEMVRKLTDLGVFIYFEKENINTQR |
| | MEGELVLTILSSLAENESLSIAENSKWSIRRRFQNGTYKISYPPYGYDYVDGKLFINKEQAEIIKRIFS |
| | EALVGKGTQKIADGLNLDKIPTKRGSHWTATTIRGILSNEKYTGDVLLQKTYTDENFKRHYNRGEK |
| | DQYMIKDHHEAIISHEEFEAVKEILKQRGKEKGVIKGSSKYQNRYPFSGKIKCAECGSSFKRRIHGSG |
| | NHKYIAWCCTKHIKDASACSMKFVREDGIHQAFVVMMNKLIFGHKFILRPLLQSLKKTNYSDNITK |
| | IQELETKIKENTERVQVIMGLMAKGYLEPALFNTQKNELSKEAALLKEQKEAINRAINGSQTILVEV |
| | EKLLKFATKAEKQIDAFDSKIFEDFIEEIIVFSQEEISFKMKCGLNLRERLVK |
| 128 | MDTKVAIYVRVSTHHQIDKDSLPLQKQDLINYANYVLNTNNYEIFEDAGYSAKNTDRPGFQNMMS |
| | RIRNNEFTHLLVWKIDRISRNLLDFCDMYNELKKINVTFVSKNEQFDTSSAMGEAMLKIILVFAELE |
| | RKLTGERVTAVMLDRATKGLWNGAPIPLGYIWDKIKKFPVIDDAEKNTIELIYNTYLKVKSTTAIRS |
| | LLNANNIKTKRNGTWTTKTISDIIRNPFYKGTYRYNYREPGRGKVKSENEWVVIEDNHKGIISKELW |
| | RKCNAIMDENAKRNNAAGFRANGKVHVFAGLLECGECHNNLYSKQDKPNLDGFIPSVYVCSGRY |
| | NHLGCNQKTISDNYVGTFIFNFISNILKTQNKIKKLDSKLLEKALLNGNVFKDIIGIENIEDLQNKSYA |
| | SNVLKNKKNANEDNSFGLEVNKKEKAKYERALERLEDLYLFDDNAMSEKDYIIRKKKIAEKLNEV |
| | NEKLKELNTFADEQEINLLSKISSFTLSKELLNAYNIHYKELILNIGRNQLKDFANTIIDKIIIKDKKILN |
| | IKFKNNLKISFVHRG |
| 129 | MKAAIYIRVSTQEQVENYSIQAQTEKLTALCRSKDWDVYDIFIDGGYSGSNMNRPALNEMLSKLHE |
| | IDAVVVYRLDRLSRSQRDTITLIEEYFLKNNVEFVSLSETLDTSSPFGRAMIGILSVFAQLERETIRDR |
| | MVMGKIKRIEAGLPLTTAKGRTFGYDVIDTKLYINEEEAKQLRLIYDIFEEEQSITFLQKRLKKLGFK |
| | VRTYNRYNNWLTNDLYCGYVSYKDKVHVKGIHEPIISEEQFYRVQEIFARMGKNPNMNRDSASLL |
| | NNLVVCSKCGLGFVHRRKDTMSRGKKYHYRYYSCKTYKHTHELEKCGNKIWRADKLEELIIDRV |
| | NNYSFASRNVDKEDELDSLNEKLKTEHTKKKRLFDLYISGSYEVSELDAMMSDIDAQINYYEAQIE |
| | ANEELKKNKKIQENLADLATVDFDSLEFREKQLYLKSLINKIYIDGEQVTIEWL |
| 130 | MKAAIYIRVSTQEQVENYSIQAQTEKLTALCRSKDWDVYDTFIDGGYSGSNMNRPALNEMLSKLH |
| | EIDAVVVYRLDRLSRSQKDTITLIEEYFLKNNVEFVSLSETLDTSSPFGRAMIGILSVFAQLERETIRD |
| | RMVMGKIKRIEAGLPLTTAKGRTFGYDVIDTKLYINEEEAKQLQMIYDIFEEEKSITTLQKRLKKLG |
| | FKVKSYSSYNNWLTNDLYCGYVSYADKVHTNGVHEPIISEEQFYRVQEIFSRMGKNPNMNRDSAS |
| | LLNNLVVCGKCGLGYVHRRKDTVSRGKKYHYRYYSCKTYKHTHELEKCGNKIWRADKLEELIIDR |
| | VNNYSFASRNVDKEDELDSLNEKLKTEHAKKKRLFDLYISGSYEVSELDGMMADIDAQINYYEAQI |
| | EANEELKKNKKIQENLADLATVDFDSLEFREKQLYLKSLINKIYIDGEQVTIEWL |
| 131 | MKAAIYIRVSTQEQIENYSIQAQTEKLTALCRSKDWDVYDIFIDGGYSGSNMNRPALNEMLSKLHEI |
| | DAVVVYRLDRLSRSQRDTITLIEEYFLKNNVEFVSLSETLDTSSPFGRAMIGILSVFAQLERETIRDR |
| | MVMGKIKRIEAGLPLTTAKGRTFGYDVIDTKLYINEEEAKQLQMIYDIFEEEKSITTLQKRLKKLGF |
| | KVKSYSSYNNWLTNDLYCGYVSYADKVHTNGVHEPIISEEQFYRVQEIFSRMGKNPNMNRDSASL |
| | LNNLVVCGKCGLGYVHRRKDTVSRGKKYHYRYYSCKTYKHTHELEKCGNKIWRADKLEELIIDR |
| | VNNYSFASRNVDKEDELDSLNEKLKTEHAKKKRLFDLYISGSYEVSELDGMMADIDAQINYYEAQI |
| | EANEELKKNKKIQENLADLATVDFDSLEFREKQLYLKSLINKIYIDGEQVTIEWL |
| 132 | MGKNGARVYSYLRFSDPRQATGSSADRQLAYASAWASKHGMELDATLTLRDEGLSAYHETHVK |
| | QGALGAFLRAVDEGRIPAGSVLIVEGLDRLSRAEPLLAQAQLGQIVNAGITVVTASDGREYNREGL |
| | KAEPMNLVYSLLVMIRAHEESDTKSKRVKAAVRRQCEGWVTGSYRGRIVSGKDPQWLAWDGDS |
| | WQFIPERVEAVRFALDAYRSGIGAARLVRLMHEKGMVLSDWGIAAQQVYRLVRLPALRGAKRISI |
| | DGEDFMLEDYYPRLLSDEEFSELETLVGQRYRRRGKDEIVGIVTGIGITRCGYCGTALVAQNLMQR |
| | VKSDGSLEDGHRRLHCVSYSKNGGCNGGSCSSVPIERAVLAYCSDQMNLQRLLEPSSAGEDLRPRL |
| | VEAKKGVAEIERQLERVTDALLADDTGAAPMAFVRKARELEEDLERRRSAVRALEQELVTKSAST |
| | PAAGASKWAELAERAKSMTDVEAREQARQLVMDTFETLVVYMRGVMPTPKGRYIDLMMRSRAG |
| | QTRWLRVDRRSGVWRESGDSSRRLEG |
| 133 | MKVAIYTRVSSAEQANEGYSIHEQKRKLISFCEVNDWNRYEVFSDPGVSGGSMKRPSLQKLFDRLE |
| | EFDLVLVYKLDRLTRNVRDLLEMLEVFEKNNIAFKSATEVFDTNSAIGKLFITMVGAMAEWERETI |
| | RERSLMGSHAAIRSGKYIRARPFCYDLIDDKLKPNQHAKYIRFMVDKLMIGKSASEVVRQLESKKK |
| | PPGITKWNRKMILNWIKNPVMRGHTKFGDLLIENTHEPIISEDEYLKLIDIIEKRTYKTKSKHKAIFRG |
| | VLECPRCQSKLHLSRSIKKYDNGKTREVRRYSCDKCHRDNTVKNISFNESEIERQFINTLLKKGTDN |
| | FKISVPKKKSYDIEDNKVKINEQRANYTRSWSLGYIKDEEYFMLMDETENLLKDIEEKAKSHTDEK |
| | LNEEQIRTVKNLLIKGFKIATLEDKEDLITSSVDVIKFEFIPKEFNKNKTLNTVKINEIQFKF |
| 134 | MKVAIYTRVSSAEQANEGYSIHEQKRKLISFCEVNDWNRYEVFSDPGVSGGSMKRPSLQKLFDRLE |
| | EFDLVLVYKLDRLTRNVRDLLEMLEVFEKNNIAFKSATELFDTTSAIGKLFITMVGAMAEWERETIR |
| | ERSLIGARAAVRSGKYIKVQPFCYDLVDQKLKPNQYAEYIRFIVDKLLSGKSANEVVRLLESKKKPP |
| | GITKWNRKTVLGWMRNP1LRGHTKHGDLLIKNTHEPIISEDEHSKMLDIIDKRTHKSKTKHNSIFRG |
| | VIECPQCQNKLYLFSSIQKRANGGSYEVRRYTCATCHKNKEVKDVSFNESEIEREFINTLLKKGTDN |
| | FMVNIPKPKDYDIENNKEKILEQRTNYTRAWSLGYIKDEEYFVLMDETDKLLKDIEEKESPRINIELN |
| | EQQIRTVKNLLIKGFKMATAENKEELITSTVDLIKIDFIPRRLNKESNINTVKINEIHFKY |
| 135 | MAKVTTIPATISRFTATPINEKKKRRTAAYARVSTDSEEQLTSYSAQVDYYTNYIKSRDDWEFVSV |
| | YTDEGITGTNTKHREGFKRMVADALAGKIDLIVTKSVSRFARNTVDSLTTVRQLKEKGVEIYIALKE |
| | NIWTLDSKGELLITIMSSLAQEESRSISENCTWGQRKRFADGKVTVPFKRFLGYDRGPDGNLVLNK |
| | DEAVIIRRIYSMFLQGMTPHGIAARLTADGIKSPGGKDKWNAGAVRSILTNEKYKGDALLQKSYTV |
| | DFLTKKKKVNEGEIPQYYVEGNHEAIIQPEVFELVQQELERRKSSRGRHSGVHLFSGKIRCGQCGE |
| | WYGSKVWHSNSKYRRVIWQCNHKYDGEEKCSTPHLTEDEIKAMFVSAANKLIGKKAAIISPLRNSL |
| | DVAFDTSALETEVAELQDEIMVVSDLIEKCIYENAHVALDQTEYQKRYDGLTTRFDTAKARLEEIE |
| | AALADKKSRRAAIDAFLDTLAQADPMEKFDPALWCGLIDYVTVYARDDVRFAFKDGQEIKA |
| 136 | MGKNGARVYSYLRFSDPRQATGSSADRQLAYASAWASKHGMELDATLTLRDEGLSAYHETHVK |
| | QGALGAFLRAVDEGRIPAGSVLIVEGLDRLSRAEPLLAQAQLGQIVNAGITVVTASDGREYNREGL |
| | KAEPMNLVYSLLVMIRAHEESDTKSKRVKAAVRRQCEGWVTGSYRGRIVSGKDPQWLAWDGDS |
| | WQFIPERVEAVRFALDAYRSGIGAARLVRLMHEKGMVLSDWGIAAQQVYRLVRLPALRGAKRISI |
| | DGEDFMLEDYYPRLLSDEEFSELETLVGQRYRRRGKDEIVGIVTGIGITRCGYCGTALVAQNLMQR |
| | VKSDGSLEDGHRRLHCVSYSKNGGCNGGSCSSVPIERAVLAYCSDQMNLQRLLEPTSAGEDLRPRL |
| | VEAQKGVAEIERQLERVTDALLADDSGAAPLAFVRKARELEEDLERRRSAVQALEQELVAKSASA |
| | PAAGASKWAELAERAKSMADVDAREQARQLVMDTFETLVVYMRGVIPNPKGRYIDVMMKSRAG |
| | QTRWIRVDRRTGVWKEGADRPTTRRP |
| 137 | MTVGIYIRVSTEEQAREGFSISAQREKLKAYCISQDWQDYKFYVDEGKSAKDTNRPYLKLMLDHIQ |
| | QGLINVVLVYRLDRLTRSVKDLYKLLDLFDKNNCIFRSATEVYDTGSATGRLFITLVAAMAQWERE |
| | NLGERVTMGQVEKARQGQYSAPAPFGFKKQDETLVKDKKQGYILMDMIDKVKKGWSIRQIAKYL |
| | DQSYLPIRGYKWHIATILSILHNPALYGALRWKDELNETSHEGYLTKEEFEELQNILYSRQNFRKRQI |
| | ESAHIFQMKLVCPQCGNRLGCERSVYFRKKDQKNVESLHYRCQSCALNERPSISVSEKKLEKALLL |
| | FMKNVKFDLEPVVKEEKNETTEIQNAIVKIERQREKFQKAWASDLMTDEEFTARMSETRKAHENFT |
| | KRLSEIQRATPLPIDIKKAKKLVNEFKINWAYLNTEEKREFVQSFIEKIEFTKKDQNPHILNVSFY |
| 138 | MSTITKIQSYQRDVKQLRVAAYCRVSTNNIEQLESLENQREHYQKYISNQPNWQLAKIYYDEGISGT |
| | KLTKRDALKELLTDCHNHQIDLVITKSISRLSRNTTDCLRIVRELQQLNIPIIFEKEHINTGEMASELFL |
| | SIFSSLAQDESHSTAGNLRWAIRQRFASGKFHVSSAPYGYSIKDGNLVINHTEAKTVRQVFQRFLSGI |
| | SASQIAKKLNQKQVPTKRGGQWRSNTVINILRNINYTGGMLCQKTYRDDQYHRHFNQGEITQYLIE |
| | DHHPSLINHRSYHRAQVLIKEAAQKHHIEVGSHKYQQHYLFSGKITCGYCGTVFKRQTRPHKICWA |
| | CQQHLKSAQQCPVKAVSEKSLEAAFCNMINELVYSEKFLLRPLLEGLKEEANANSDGQLISLTKQIK |
| | TNDHKAETLTELMHASLLDKAIYVNQTAKLEQDTYQCREKIKQLNGQNTDSANNFEDVRALLRW |
| | CQQGQMLTEFDGTLFQEFVRQVVVNSSNEATFNLKCGLSLPEKLNKNATIDGHFYRDIIKQRYNDPI |
| | KQTEYLYSIIESEGDLIG |
| 139 | MGKVRIIPAHQQKGNSVQPQQSRQPFEQLRVAAYCRVSTDYDEQASSYETQVVHYKELIQKEPTW |
| | EFAGIYADDGISGTNTKKREQFNQMIAACKAGKIDLIVTKSISRFARNTIDCLKYIRDLKAINVAIFFE |
| | KENINTMDAKGEVLITIMASLAQQESESLSQNVKMGIQYRYQQGKIFVNHNHFLGYTKDAQGNLVI |
| | EPAEAKIIKRIFYSYLNGMSMKQIADSLKADGILTGGKTKNWQSSGVSRILKNEKYMGDALLQKTY |
| | TVDFLNKKRVKNNGIMPQYYVENDHPAIIPKPVFMQVQQLIKQRQNGITTKNGKHRRLNGKYCFS |
| | QRVFCGKCGDIFQRNMWYWPEKVAVWRCASRIKRSKSGRRCMIRNVKEPLLKEATVQAFNQLIEG |
| | HKLADKQIKANIMKVIKNSKGPTLDQLDKQLEEVQMKLIQAANQHQDCDALTQQIMDLRKQKEK |
| | VQSRETDQQAKLHNLDEINKLVELHKYGLVDFDEQLVRRLVEKITIFQRYMEFTFKDGEVIRVNM |
| 140 | MTTPLRGLSVLRLSVLTDETTSPERQRTANHDAGAALGIDFSDREAVDLGVSASKTTPFERPELGA |
| | WLKRPDDFDALVFWRFDRAVRSMDDMHELSKWARDHRKMIVIAEGPGGRLVLDFRNPLDPMAQ |
| | LMVTLFAFAAQFEAQSIRERVLGAQAAMRTMPLRWRGSKPPYGYMPAPLESGGMTLVQDEKAVV |
| | VIERAIKELKNGKTLSAICHELNEAGIPSPRDHWSLVQGRKKGGGVGNSVGERIKKESFKWRHGAL |
| | KKLLTSESLLGWKMTRSGPVRDDEGAPVMATREPILTREEFDAVGALIIEANEDGTKWERRDSTAL |
| | LLRVILCDGCGQHMFVGNPSANSKGISAVYKCGAWGRGEKCPEPASVKLEWAEDYVRERFLRSVG |
| | GMRLTETRRIPGYDPQPEIDATTAEYEAHMREQGQQKSKAAQAAWKRRADALDARLAELESREA |
| | RPARVEIVQLGMTIADAWRDADDKERRDMLREAGVTVRIKRAKRGRTFKLNEDRVKWHMANEFF |
| | AQGAEELEAIARDEEHANGSQ |
| 141 | MASHSSWEIHPDLAAALASGKTVEEWLDGRTPVVSYARISVDLQKVKAIGVARQHGMHCDPAAK |
| | EQGSAVVYRYTDNDLTAADPDVQRPAFLQMVRDLRARQTAEGIAIRGILAVEEERVVRLPEDYLK |
| | LYRALTVEEDAVLYYTDKRQLVDVYAEVEQTRGLMSSSMGETEVRKVKRRAKRSTKDRAAEGKY |
| | TGGARRFGWLGADKDLGRTQNEKLDPNESVWLRNMIDMKLCGKGWHTIAVWLISESIATVRGGE |
| | WTSTGVKSLLTNPAICGYRILNGELVLDPGTGEPKVGNWETIATPEEWHQICEMAWPGGKLAKTK |
| | KPKGKKRARKHLSTGILRCGWIPKSDPKEDMCLHSMVGRPPHGNHKWGNYVCNGTDCRKVSRR |
| | MDKIDRIVEGIVVRTLKDQFATLAPEEKTWHGQYTLERLTARRQELKAAYKAEHISMADYLEFIDP |
| | LDAQIKESQADRDAFYAEQAAKNFLAGFTEERWHDFDLEQKQTAIGTVLQAVIVHPLPEGRSRKAP |
| | FDPSLIEIVFKNPH |
| 142 | MKAAIYIRVSTQEQIENYSIQAQTEKLTALCRSKDWDVYDTFIDGGYSGSNMNRPALNEMLSKLHE |
| | IDAVVVYRLDRLSRSQRDTITLIEEYFLKNNVEFVSLSETLDTSSPFGRAMIGILSVFAQLERETIRDR |
| | MVMGKIKRVESGLPLTTAKGRTYGYDVVDTKLYINEEEAQHLQLIYDIFEEEKSITFLQKRLKKLGF |
| | KVKSYSSYNKWLMNDLYIGYVSYSDKVHAKGIHEPIISEDQFYRVKEIFSRMGKNPNMNKESSSLL |
| | NNLIVCEKCGLGYVHRAKDTVSRGKKYHYRYYSCKTYKHTHELEKCGNKIWRADKLEEIIISRVK |
| | NYSFATRNLDKEDELDSITEKLKTEHSKKKRLFDLYINGSYEVAELDKMMADIDAQINYYDSQIEA |
| | NKELKRNKKVQESLAELATVDFDSLEFREKQIYLKSIINKIYIDGEQVTIEWI |
| 143 | MIQAFSYVRFSTKSQATGTSLERQLNASKLFCQQHNLELSSKGYNDLGISGFKNVKRPELDQMLEAI |
| | QSGVIPSGSYILIEAIDRLSRKGISHTQDVLKSILLHDIKVAFVGEDAKTLAGQILNKNSLNDLSSVILV |
| | ALAADLAHKESLRKSKLIKAAKAIIREKAQQGKKIRGHTMFWIDWSESNNKFVLNDKKSIIKEIVKL |
| | RLAGNGPRKIATVLNEQQIPSPSGKQWNHMTVKVALRSPTLYGAYQTHQIIEGKAVPDILIKDHYPA |
| | ITNYETYLQLQSDSSKANKGKPSKANPFSGILKCSCGHGMNFSKKVMVYKDKPHEYEYHFCSASTE |
| | GRCPNKKRIRDLVPLLTSLMDKLTIKQTTKKNLNLEEIKLKEQKIEKLNLMLLEMDNPPLSVLKTIQ |
| | KLEEELNLLLKTTDSPDVSQNDVESLSSINDAQEYNMHLKRIVRKIEVHQLDTTGKNLRIKVLKTDG |
| | HSQNFLIKSGEVLFKSDTEQMKNLLKTMKEA |
| 144 | MAYAVYVRVSSDKDEQVSSVENQIDICRYWLENNGFEWDKNAVYFDDGISGTAWLERHAMQLIL |
| | AKARKKELDTVVFKSIHRLARDLKDALEIKEILLGHGVRLITIEEGYDSHYEGKNDMKFEMYAMFA |
| | SQLPKTLSVSVTAALAAKVRRGGYTGGFVPYGYEIVDDKYAINEEEAELVREIFELYAQGFGYIKIS |
| | NIINDQGKRTRKGAPWTYSTLCKMIKNPTYKGDYTMQKYGTVKVNGKKKKVINPEEKWVVFENH |
| | HPAIVSRELWDKVNNKDPNKFQKKRRISTTNELRGITFCAHCGTAMSKRNNVRVNKNGTVKEYSY |
| | MICDWSRVTARRECVKHVPIHYKDLRALVLSKLKEKESVLDKEFYSDEDQLDVKLKKLNRDIKDL |
| | KFKRERLLDLYLEDERIDKDTFTIRDAKLEKEIELKELEMRKANNIELQMKERQEIRDAFALLEESK |
| | DLNSAFKKLIKRIEVAQDGAVDIHYRFAE |
| 145 | MGKNGARVYSYLRFSDPRQATGSSADRQLAYASAWASKHGMELDATLTLRDEGLSAYHETHVK |
| | QGALGAFLRAVDEGRIPAGSVLIVEGLDRLSRAEPLLAQAQLGQIVNAGITVVTASDGREYNREGL |
| | KAEPMNLVYSLLVMIRAHEESDTKSKRVKAAVRRQCEAWVAGSYRGRIVSGKDPQWLAWDGDS |
| | WQFIPERVEAVRFALDAYRSGIGAARLVRLMHEKGMVLSDWGIAAQQVYRLVRLPALRGAKRISI |
| | DGEDFMLEDYYPRLLSDEEFSELETLVGQRYRRRGKDEIVGIVTGIGITRCGYCGTALVAQNLMQR |
| | VKADGSLEDGHRRLHCVSYSKNGGCNGGSCSSVPIERAVLAYCSDQMNLQRLLEPSSAGEDLRPR |
| | LVEAQKGVAEIERQLERVTDALLADDSGAAPLAFVRKARELEEDLERRRSAVRALEQELVAKSAS |
| | APAAGASKWAELAERAKSMADVDAREQARQLVMDTFETLVVYMRGVIPNPKGRYIDVMMKSRA |
| | GQTRWIRVDRRTGVWKEGADRPTTRRP |
| 146 | MRSESTSAFGQPNDINPILLLSDTATPGSMAIKAKVYSYLRFSDPKQAAGSSADRQMEYARRWAAE |
| | HGMTLDSELSMQDAGLSAYHQRHVTRGALGLFLQAIDDARIPAGSVLVVEGLDRLSRAEPIQAQA |
| | QLAQIINAGITVVTASDGREYNREGLKAQPMDLVYSLLVMIRAHEESDTKSKRVRAAIHRQCQGW |
| | MAGTWHGLVRNGKDPHWLRLVGQAYEIVPERGEAVRTAVSMFRQGHGAVRIMRSLADSGLQITN |
| | GGNPSQQLYRIVRNRALIGEKVLAVDGQEYRLAGYYPPLLSPAEFADLQHLTAQRSRHKGTGEIPG |
| | LITGMRIAFCGYCGAAMVSQNLMNRGRQEDGRPQNGHRRLICVSNSQGGGCPVAGSCSVVPIEHA |
| | LLTFCADQMNLSRLLDFGNRANGIAGQLSIARVQVSDTTARIDKITDALLASDAGQAPAAFLRRAR |
| | ELESELAEQQKRVEALEHELAAVALSPEPAAAKAWAGLVEGVEALDHDARIKARQLVADTFDRIV |
| | VFHRGRTPEHSRSWKGTIDLLLMAKRGGARLLHIDRQTGGWKAGEEIDTIQIPLPPGVAEATSQSEA |
| | LPGLVSR |
| 147 | MKCAIYRRVSTDEQAEKGFSLENQLLRLQAFADSQGWEIVADYMDDGYSGKNTDRPALKKMFAE |
| | IDNFDVILVYKLDRFTRSVRDLNDMLETIKGHDIAFKSVTEAIDTTTATGRMILNMMGTTAQWERE |
| | MISERIKDVLGKLAEQGIFPKGKPTYGYKIKNGVISIDEKEAEVVKLIFEKSKTLGQHAVSKYLRDN |
| | GIYTPSGSTWMSGGIGRIIRNPFYYGEMKVNGKLIAIKNEGYKPLISKEEFDLVNRISKSRNIKNPKR |
| | KSDIIYPFSGIALCPRCNKPLRGDRSKVGGKYYTYYRCINTREGRCTMKRIRTQVIDNAFSEYVAGA |
| | FNEANIQIDNKDERNALERKIEALKSKIDRLKELYIDGDITKVRYKEQTEAINSEINSTQDKMLSLDD |
| | GKITEKAIEKAKELDKVWLLLDDKTKDESLRSVFDTITLEETERGIIITGHSFL |
| 148 | MMDRNKVAIYVRVSTQGQVDDGYSLDEQVDLLTNYCKLKEWTLYDVYVDPGISGKNMHRPEIER |
| | LTRDAKRKLFDIVLIYDLKRLGRSQKENIVLVEDVFNPNGIRLVSFTENFDASTPVGKMVFGMLSAY |
| | AELDRANIAERMMMGKIGRAKAGKAMSWGMPPFAYDYNKETGDLELDEVKAPIVEMIYSEFLKG |
| | ASVNKIVQKLNSMSYHGKNHEWKHHAVTVIIDNPVYCGMMKYMGQTYQAKHTPIIDKKTFELAQ |
| | LERKKRLSKYHDADWLGPFQRKYIGSKICYCGLCGAHLKSEKDKKNKLTGIRSISFFCPNTRSRGTG |
| | ECTNPRFKQSVLEGYILNEVAKLQQNPEKLKDIKPAEDNELHNKIATYEKKIKQNSSKLSKLNDLYL |
| | NDLISLDDLKQQSKSLLNENEFMEEQIKLLSATTREDELRKKIDTFLAFPDILTADYDTQKQAVELVI |
| | SRVEATKEGIDIFFNF |
| 149 | MKAVVTKKRCAVYTRVSTDERLDQSFNSLDAQREAGQAYIVSQRAEGWLPVGDDYDDGGYSGG |
| | NMERPALKRLLADIVADQIDIVVVYKIDRLTRSLTDFAKLVEVFERHKVSFVSVTQQFNTTTSMGR |
| | LMLNILLSFAQFEREVTGERIRDKIAASKRKGLWMGGYTPLGYEIKDRKLVIEEKDAEIIRRIFTRFTE |
| | LRSITDVVRELALEGLTTKPNRLKDGRVRNGTPMDKKYISKLLRNPIYVGEIRHKGTVFAGQHEPIIT |
| | RQLWDRVQGILAEDAYERMGKTQTRHKTDALLRGLMYGPDGGKYHITYSKKPSGKKYRYYIPKA |
| | DSRYGYRSSATGMIPADQIEEVVVNLLVGALQSPESIQGVWNTVRDKYPEIDEPTTVLAMRRLGEV |
| | WKQLFPAEQVRLVNLLIERVQLLSDGVDIVWRESGWRELAGELQADSIGGELLEMEMTP |
| 150 | MKKITKIEGNQDYIFKPKTRVVAYCRVSTDSDEQLVSLQAQKAHYETYIKANPEWEYAGLYYDEGI |
| | SGTKKENRSGLLRMLSDCETRSIDLIITKSISRFARNTTDCLEMVRKLMDLGVHIYFEKENINTGSME |
| | SELMLSILSGLAESESISISENTKWAIQRRFQNGTFKISYPPYGYQNIDGRMIVNPKQAEIVKYIFAEV |
| | LSGKGTQKIADDLNRKGIPSKRGGRWTATTIRGILTNEKYTGDVILQKTYTDSRFNRHTNYGEKNM |
| | YLVENHHEAIISHEDFEAVEAILNQRAKEKGIEKRNSKYLNRYSFSGKIICSECGSTFKRRIHSSGRRE |
| | YIAWCCSKHISHITECSMQFIRDEDIKTAFVTMMNKLIFGHKFILRPLLNGLRSQNNAESFRRIEELET |
| | KIENNMEQSQMLTGLMAKGYLEPAMFNKEKNSLEAERESLFAEKEQLTHSVNGIFTKVEEVDRLL |
| | KFTTKSKMLTAYEDELFKNYVEKIIVFSREVVGFVLKCGITLKERLVN |
| 151 | MKAAIYIRVSTQEQIENYSIQAQTEKLTALCRSKDWDVYDIFIDGGYSGSNMNRPALNEMLSKLHEI |
| | DAVVVYRLDRLSRSQRDTITLIEEYFLKNNVEFVSLSETLDTSSPFGRAMIGILSVFAQLERETIRDR |
| | MVMGKIKRIEAGLPLTTAKGRTFGYDVIDTKLYINEEEAKQLQMIYDIFEEEKSITTLQKRLKKLGF |
| | KVKSYSSYNNWLTNDLYCGYVSYADKVHTKGVHEPIISEEQFYRVQEIFSRMGKNPNMNRDSASL |
| | LNNLVVCGKCGLGYVHRRKDTVSRGKKYHYRYYSCKTYKHTHELEKCGNKIWRADKLEELIIDR |
| | VNNYSFASRNVDKEDELDSLNEKLKTEHTKKKRLFDLYISGSYEVSELDAMMSDIDAQINYYEAQI |
| | EANEELKKNKKIQENLADLATVDFDSLEFREKQLYLKSLINKIYIDGEQVTIEWL |
| 152 | MSLMDENTQKNVGIYVRVSTEEQAKEGYSISAQKEKLKAYCISQGWNSYKFYIDEGKSAKDIHRPS |
| | LELMLRHIEQGIIDTVLVYRLDRLTRSVRDLYSLLDYFDKYQAVFRSATEVYDTGSATGRLFITLVA |
| | AMAQWERENLGERVKMGQVEKARQGQFSAPAPFGFTKEGESLVKNPEEGEVLLDMIDKIKKGYS |
| | LRELADYLDESDAIPKRGYKWHIASILVILKNPVLYGGFRWAGEILEGAFEGYISKKEFEQLQKMLH |
| | DRQNFKRRETSSIFIFQAKILCPNCGSRLTCERSIYFRKKDNKNVESNHYRCQACALNKKPAIGISEK |
| | KFEKALIEYMQNANFKREPKIPQEKQQDYDKLHQKIISIEKQRKKYQKAWSMELMTDQEFEQLMA |
| | ETKEALQKALAKLEQNDLHPIEKPLNIERAKELAKMFRENWSVLTGEEKRQTVQELIKHIEFEKKD |
| | NKARILDIHFY |
| 153 | MNKICIYLRKSRADEELEKTLGEGETLSKHRKALLKFAKEKKLNIVEIKEEIVSGESLFFRPKMLELL |
| | KEVENKQYTGVLVMDMQRLGRGNMQDQGIILETFKKSNTKIITPMKTYDLSNDFDEEYTEFEAFM |
| | SRKELKMINRRMQGGRVRSVEDGNYIATNPPLGYDIHWIKKSRTLKINAHECEIIKLIFKLYTEGNG |
| | AGSIAEHLNNLGYKTKFNNNFSRSSVLFILKNPIYIGKVTWKKKEIKKSKNPNKTKDTRTRDKSEWI |
| | VVDGKHEPIISMKMWNKAQEILNNKYHIPYQLVNGPANPLAGIVICSKCKFKMVMRKLKGIDRLLC |
| | RNNKCDNISNRYDSTEKAIVQALERYLNEYRINISNKNKTSNIKPYERQVNILEKELAALNEQKLKL |
| | FDFLERGIYDENTFLERSKNIEKRITKTSSGIEKINDIINKEKKVIKEEDVIKFQKLLDGYKNTDDIKLK |
| | NELMKKLVNKVEYTKDKRGETFGIDIFPKLKP |
| 154 | MTVGIYIRVSTEEQVKEGFSISAQKEKLKAYCTAQGWEDFKFYVDEGKSAKDMHRPLLQEMITHIK |
| | KGLIDTVLVYKLDRLTRSVVDLHNLLSIFDEYNCAFKSATEVYDTSSAMGRFFITIISSVAQFERENT |
| | SERVSFGMAEKVRQGEYIPLAPFGYVKGPDGKLIINEAEKEIFLHVVNMVSTGYSLRQTCEYLTNIG |
| | LKTRRSNDVWKVSTLIWMLKNPAVYGAIKWNNEIYENTHEPLIDKTTFDKLANILSIRSKSTTSRRG |
| | HVHHVFKGRLICPQCGKRLSGLRTKYVNKNKETFYNNNYRCATCKEHRRPAIQISEQKIEKAFIDYI |
| | SNYTLNKANISSKKLDNNLRKQEMIQKEIISLQRKREKFQKAWAADLMNDDEFSKLMIDTKMEIDA |
| | AEDRKKEYDVSLFVSPEDIAKRNNILRELKINWTSLSPTEKTDFISMFIEGIEYVKDDENKAVITKISF |
| | L |
| 155 | MKCIVYVRVSTEEQAKHGYSIAAQLEKLEAYCISQGWELTEKYVDEGYSAKDLHRPYFEKMMNKI |
| | KQGNVDILLVYRLDRLTRSVMDLYKILKILDDNNCMFKSATEVYDTTNAMGRLFITLVAAIAQWE |
| | RENLGERVRLGMEKKTKLGIWKGGTPPYGYKIVDKHLVINEKEQDVVKTVIALLSKTLGFYTVAKQ |
| | LTIKGFSTRKGGEWHVDSVRDIANNPVYAGYLTFNQNLKEYKKPPREQTLYEGNHEPIISKDEFWA |
| | LQDILDKRRTFGGKRETSNYYFSSILKCGRCGHSMSGHKSGNKKTYRCSGKKAGKNCSSHIILEDN |
| | LVKKVFHVFDQIVGSINGPTNATEYSFEKVLELENELKSIERILNKQKIMYENDIIGIDELITKSTELRE |
| | REKKINNELKNIKQNTPKNQKEIEYLTKNIESLWQHANDYERKQMITMIFSRIVIDTEDEYKRGSGN |
| | SREIIIVSAE |
| 156 | MKGESELDKKAAIYIRVSTQEQATEGYSIQAQTDRLTKYVEAKDFILYKKYIDAGYSASKLERPAM |
| | QELIQDVQSKKVDVIIVYKLDRLSRSQKDTMYLIEDIFRPNDVELISMQESFDTSTAFGSATVGMLS |
| | VFAQLERKSISERMITGRVERAKKGFYHTGGQDRPPAGYQFNSDNQLIINEYEAAAIKDLFRLYND |
| | GLGKSSISEYLKKNYPGKNKWLPSSIDRMLKNSLYIGKVKFSGAEYDGIHEPIIDEVTFYKTQKEIAR |
| | RKQSNTKRYNYVALLGGLCECGICGAKMANRRAVGRKGKVYRYYRCYSKKGSPKHMMKTDGCS |
| | SKAQQQFIIDEAVINNLKNIDVEAELKRRSAPQTNTSLISSQIESIDKQINKLIDLFQVDSMPLDVISEK |
| | IDKLNKEKQSMEKLLERKNKLDKTELQHRFDVLKSFDWDNSSIESKRVVIEMLVQKVIIHDNSIEIIL |
| | VE |
| 157 | MNYERSYLRSCQVSTLEQKEHGYSIEEQERKLKSFCEINDWSVSDVFIDAGFSGAKRDRPELQRMM |
| | NDIKRFDLVLVYKLDRLTRNVRDLLDLLEVFEQNNVAFRSATEVYDTSTAMGRLFVTLVGAMAE |
| | WERETIRERVMMGKRAAIKQGMILTPPPFYYDRVDNTYIPNDYKKVVLWAYDEVMKGNSSKAIA |
| | RKLNDSDIPPPNGKRWEDRTITRALRNPITRGHYTWGDVFIENSHEPIITEEMYQQIKERLEERINTKI |
| | VSHVSVFRGKFICPRCGGTLTLNTVTRKRKKGYVTYKTYYCNTCKAKKQSFGFSENEALRVFRDY |
| | LSKLDLEKYEVKTKQKDDVVTIDIDKIMEQRKRYHKLYAKGLMKEEELFGLIKETDETIAEYEKQK |
| | ELVPRKSLDIDKIKKFKNALLESWEIFSLEDKADFIKMAIKSIDIDYVKLKNRHSIKINDIEFY |
| 158 | MKVAIYTRVSTAEQNLNGFSIHEQRKKLISFCEINEWKEYEVFTDGGFSGGSTKRPALQDLFSRLTQ |
| | FDLVLVYKLDRLTRNVRDLLEMLERFEKYNVSFKSATEVFDTTTAIGKLFITIVGAMAEWERETIRE |
| | RSLFGSRAAVESGKYIREQPFVYDNIEGKLVPNENTKYIEYIVKKFKEGNSANEIARLLNSKKKPSKI |
| | KNWNRQTIIRLIKNPVLRGHTKFGDIFMENTHEPVLSDDDYHKVINAIENKTHKSKSKHNAIFRGVL |
| | KCPQCNGNLHLYAGTIRPKNGRSYNVRRYTCDKCHRDKYSRNISFNESEIENKFIEELEKMDLTRFE |
| | IHKPKKVEINIESDKKRIKEQRTKLLRAYTMGYVEEEEFKIIMDETQRQLEDIKREENKETVQEIDEK |
| | QIKSIGNFIIEGWKTLTIKEKEKLILSSVDKIDIEFIPREKNNNSNTNTVNIKKVHFIF |
| 159 | MNYERSYLRSCQVSTLEQKEHGYSIEEQERKLKSFCEINDWSVSDVFIDAGFSGAKRERPELQRMM |
| | KDIKRFDLVLVYKLDRLTRNVRDLLDLLEIFEQNNVAFRSATEVYDTSTAMGRLFVTLVGAMAEW |
| | ERETIRERVMMGKRAAIKQGMILTPPPFYYDRVDNTYIPNDYKKVVLWAYDEVMKGNSSKAIARK |
| | LNDSDIPPPNGKRWEDRTITRALRSPITRGHYTWGDVFIENSHEPIITEEMYQQIKERLEERINTKIVS |
| | HVSVFRGKFICPRCGGTLTLNTTTRKRKKGYVTYKTYYCNTCKGKKKSFGFAENEALRVFRDYLS |
| | KLDLEKYKVKTKQKDDVVTIDIDKIMEQRKRYHKLYAKGLMQEEELFELIKETDETVAEYEKQKE |
| | LVPRKSLDIDKIKKFKNALLESWEIFSLEDKADFIKMAIKSIDIEYVKLKNRHSIEIKDIEFY |
| 160 | MNVAIYCRVSTLEQKEHGYSIEEQERKLKSFCEINDWNVADVFVDAGFSGAKRDRPELQRMMNDI |
| | KRFDLVLVYKLDRLTRNVRDLLDLLEIFEQNNVAFRSATEVYDTSTAMGRLFVTLVGAMAEWERE |
| | TIRERTQMGKLAALKKGIMLTTPPFYYDRVDNKFVPNKYKEVVLFAYEEALKGKSAKSIARKLNN |
| | SDIPPPNNRKWEDRSITRALRSPFTRGHFEWGGVYLENNHEPIITEEMYEKVKDRLEERTNTKKIKH |
| | VSIFRSKLVCPTCHNKLTMNTHKVTLKDRVYYNKHYYCNNCKETPNLKPVYIRAEEVERVFYDHL |
| | QHQDLTQYDIVEDKEEKEVAIDINKVMQQRKRYHKLYANGLMNEDELAELIEETDIAIEEYKKQSE |
| | NKEVKQYDTEDIKQYKNLLLEMWDISSDEEKAEFIQMAIKNIFIEYVLGKNDNKKKRRSLKIKDIEF |
| | Y |
| 161 | MITTNKVAIYVRVSTTSQAEEGYSIEEQKAKLSSYCDIKDWSVYKIYTDGGFSGSNTDRPALEGLIK |
| | DAKKRKFDTVLVYKLDRLSRSQKDTLYLIEDIFIKNNIAFLSLQENFDTSTPFGKAMIGLLSVFAQLE |
| | REQIKERMQLGKLGRAKAGKSMMWAKTSYGYDYHRETGTITINPAQALAVKFIFESYIRGRSITKL |
| | RDDLNEKYPKHVPWSYRAVRAILDNPVYCGFNQFKGEIYPGNHEPIITEEVYNKTKEELKIRQRTAA |
| | ENVNPRPFQAKYILSGIGQCGYCGAPLKIILGVKRKDGSRFKKYECHQRHPRTLRGITTYNDNKKC |
| | DSGFYYKDDLEAYVLTEISKLQDDAGYLDKIFSEDSAETIDRKSYKKQIEELSKKLSRLNDLYIDDRI |
| | TLEELQNKSTEFISMRATLETELENDPALGKDKRKADMRELLNAEKVFSMDYEGQKVLVRGLINK |
| | VKVTAEDIIINWKI |
| 162 | MKAAIYIRVSTQEQIENYSIQAQTEKLTALCRSKDWDVYDIFIDGGYSGSNMNRPALNEMLSKLHEI |
| | DAVVVYRLDRLSRSQRDTITLIEEYFLKNNVEFVSLSETLDTSSPFGRAMIGILSVFAQLERETIRDR |
| | MVMGKIKRVESGLPLTTAKGRTYGYDVVDTKLYINEEEAQHLQLIYDIFEEEKSITFLQKRLKKLGF |
| | KVKSYSSYNKWLMNDLYIGYVSYSDKVHAKGIHEPIISEDQFYRVQEIFSRMGKNPNMNKESSSLL |
| | NNLIVCEKCGLGYVHRAKDTVSRGKKYHYRYYSCKTYKHTHELEKCGNKIWRADKLEEIIISRVK |
| | NYSFATRNLDKEDELDSITEKLKTEHSKKKRLFDLYINGSYEVAELDKMMADIDAQINYYDSQIEA |
| | NKELKRNKKVQESLAELATVDFDSLEFREKQIYLKSIINKIYIDGEQVTIEWI |
| 163 | MNVAIYCRVSSQEQANEGYSIHEQERKLKSFCEVNNWKNYKVFVDAGVSGGTINRPAFNNLLANL |
| | DKFDLVLVYKLDRLTRSVRDLLSLLETFEEHGVSFRSATEVFDTTSAIGKLFITIVGAMAEWERSTIR |
| | ERSLFGSHAAVREGNYIRVAPFCYDNIDGKLVPNEHKKVIEYIVKKLLEGVTATEIARRLNNANNYP |
| | PTIKNWSKTTVIRLVNNPVMRGHTKHGDLFIENTHEPIITEHNYKRISERLSSRVNYKKQTHTSVFRG |
| | VLECPQCGHKLHYFKSKLKNKSKTYYSEGYRCDYCRTDKTARNIAITFSEIEREFIEYMSNIRLSDN |
| | YGIEVEPKNEVIKIDINKIMRKRSRFQEAYGDGLMTKEEFKQKMKETQKLIDEYEEAESKNDVDDHI |
| | TKEQVQAVQNLFRHIWDSPNVTREDKEEFVRQSIKKIDFDFIPKSKVNKTPNTLKINNIDLHF |
| 164 | MNVAIYCRVSSQEQANEGYSIHEQERKLKSFCEVNNWKNYKVFVDAGVSGGTINRPAFNNLLANL |
| | DKFDLVLVYKLDRLTRSVRDLLSLLETFEEHGVSFRSATEVFDTTSAIGKLFITIVGAMAEWERSTIR |
| | ERSLFGSHAAVREGNYIRVAPFCYDNIDGKLVPNEHKKVVEYIVKKLLEGVTATEIARRLNNANNY |
| | PPTIKNWSKTTVIRLVNNPVMRGHTKHGDLFIENTHEPIITEHNYKRISERLSSRVNYKKQTHTSVFR |
| | GVLECPQCGHKLHYFKSKLKNKNKTYYSEGYRCDYCRTDKTARNIAITFSEIEREFIEYMSNIRLSD |
| | NYGIEVEPKNEVIKIDINKIMRKRSRFQEAYGDGLMTKEEFKQKMKETQKLIDEYEEAESKNDVDD |
| | HITKEQVQAVQNLFRHIWDSPNVTREDKEEFVRQSIKKIDFDFIPKSKVNKTPNTLKINNIDLHF |
| 165 | MKNKIAIYVRVSTTKESQKDSPEHQKWACIEHCKQIDLDTADLIIYEDRDTGTSIVARPQIQEMISDA |
| | QKGLFNTILFSSLSRFSRDALDSISLKRIFVNALGIRVISIEDFYDSQIEDNEMLFGIVSVVNQKLSEQIS |
| | VASKRGIKQSAAKGNFIGNIAPYGYQKVNIEGRKTLIVDIEKAKVVREIFDLYVNKKMGEKEITKHL |
| | NENAIPSAKGGTWGITSVQRILQNEIYTGYNVYGKYEIKKVYTNLKNIGDRKRKLVKKDQELWQK |
| | SEKRTHPEIISQELYKKAQEIRQIRGGGKRGGRRKYVNVFAKIIYCKHCGSAMVTASCKKSDKYRY |
| | LICSKRRRHGASGCPNDKWIPYYDFRDEVISWVVEKLKK |
| 166 | MARTKKATAPAIYASPRVYSYLRFSNAKQASGASIARQLDYAVKWAEQHGMELDTSLTLKDEGLS |
| | AFHEKHIEKGNFGVFLKAIEDGLIPPGSVLIVESLDRLSRAEPIIAQAQLYGILIAGIEVVTAADNTRIS |
| | LESVKKNPGILFLALGVSMRANEESERKKDRILDAAHRNAQAWQAGTSRKRAAVGKDPGWVKYN |
| | AKTNEYELLPEFVTPLMAMLGYFRAGASTRRCFAMLHEAGIPLPPPKLDLHGKLKKTRMGNVISGL |
| | ANTTRLYDIMSNRALIGEKTIVLGKSQYHDAQTYVLSGYYPPLMTEAEFEELQQMRKQGGRVANH |
| | QSRIVGIINGVGITKCMRCRSAMAGQNVLSRSRRADGKPQDGHRRLICTGVTKAKNLCTESSVSIVP |
| | IERAIMAYCSDQMNLTALFTEQEDQSRNLNGQLALARAAVAQTEAAMQKLLDAIEAAGDDTPAM |
| | FIQRARKREIELKTQQQAVADLEYKIESAHRASRPAMAEVWAKLRNGVEQLDPAARTKARLLVVD |
| | TFKRIEIKRATDRGQDLIEIRLESKQNVRRGFLIDRKTGAFYRGDHVENESIIAKPTTRPTRARRVKA |
| | AA |
| 167 | MLKIAIYSRKSVETDTGESIKNQIAICKQYFQRQNEECKFEIFEDEGFSGGNINRPDFKRMMQLVKIK |
| | QFDVVAVYKVDRIARNIVDFVNVFDELDKLNVKLVSVTEGFDPSTPIGKMMMMLLASFAEMERM |
| | NIAQRVKDNMRELAKLGRWSGGTAPSGYSVQKVKENGKEVSYLKKEKDADNIKLIFQKYASGYT |
| | AFEIHKYFKLKGFTYNPKTIYGILTNPTYLEATEESIKYLENKGYTVYGEPNGCGFLPYNRRPRYKGI |
| | KAWKDKSMMVGVSRHEPAVDLNLWIAVQSQLEKKTVAPHPHESKFTFLTGGIMKCRCGAGMGV |
| | SPGRIRSDGTRVYYFTCSGKRYRQNGCSNLSLRVDWAESKVKTFLEKMRDKETLTKYYNSNKKKS |
| | NVDRDIKSINKKIASNKKAVDSLVDKLILLSNDAAKPLAERIEDITQESNALKEELLKLEREKLFNSN |
| | DRLNIDLIHKAIIQFLDTDSLEEKKKFAKDIFDKITWDSASKELLFFLQM |
| 168 | MTVGIYIRVSTQEQASEGHSIDSQKERLASYCNIQGWEDYRFYVEEGISGKSTNRPKLQLLMDHIEK |
| | SQINTLLVYRLDRLTRSVIDLHKLLNFLNLHNCALKSATETYDTTTANGRMFMGIVALLAQWESEN |
| | MSERIKLNLEHKVLVEGERVGAVPYGFDLSDDEKLIKNEKSPILLDMVKKVESGWSANRVANYLN |
| | LTNNDRNWTANAIFRLLRNPAIYGATKWNDKIAEKTHEGIIDKERFVRLQQIFSDRSIHHRRDVKST |
| | YIFQGVLHCPNCSNKLSVNRFNRKRKDGSEYHGVIYRCQPCAKQNKMNFTIGEARFSKALIEYMAR |
| | VEFQPQEEEITSTKSGRDIHQSQLQQIERKRGKYQKAWASDLISDTEFEKLMNETRYAYDECKKKL |
| | HECEEPIKQDIERLKEIVFVFNETFNDLTQDEKKEFISRFIRNIRYTTQEQQPIRTDQSKSRKGKPKVII |
| | TEVEFY |
| 169 | MRAAIYTRVSTFDQVNGYSLDMQAHLAKQYCRDKGIDIYDVYCDEITGAKFDRPQLQRMLTDIVS |
| | KKIDLVVIHKLDRLSRSLKDTFVIVEDYLIANDVELVSLSEAIDTTTPIGKMMMGQFALYAQYERDV |
| | IRERMIMGKYGRAMTGKAMSWAPGYTPLGYDYKDGLYIPNNDKIIVVEIFDELYKGTKPKSLAKK |
| | LTYKGTLNKKWYHTSIKYIARNPVYIGKIKWRGKEFEGNHQPLIAKDFFRAVQEILDEYK |
| 170 | MYYERSYLRSCQVSTLEQKEHGYSIEEQERKLKSFCEINDWTVTDTFIDAGFSGAKRDRPELQRLM |
| | NDINKFDLVLVYKLDRLTRNVRDLLDLLEIFEQNNVAFRSATEVYDTSTAMGRLFVTLVGAMAEW |
| | ERETIRERTQMGKLAALKKGIMLTTPPFYYDRVDNKFVPNKYKEVVLFAYEEALKGKSAKSIARKL |
| | NNSDIPPPNNRKWEDRSITRALRSPFTRGHFEWGGVYLENNHEPIITEEMYNKIKDRLNERVNTKVI |
| | AHTSVFRGKLTCPTCGAKLTMNTNKKKTRNGYTTHKNYYCNNCKITPNLKPVYIKEREILRVFYD |
| | YLLNLNLEKYEIEEKQSEPEITVDIHKVMEQRKRYHKLYANGLMQEDELFDLIKETDEAIKEYESQT |
| | KNKVEKQFDIEDVKKYKKLLLEMWNVSTLEDKAEFVQMAIKSIEFDYIIDDGPPTSRKHSLKINQIIF |
| | Y |
| 171 | MYYGRSYLRSCQVSTLEQKEHGYSIEEQERKLKQFCEINDWTVSDTFIDAGFSGAKRDRPELQRLM |
| | NDINKFDLVLVYKLDRLTRNVRDLLDLLEIFEQNNVAFRSATEVYDTSTAMGRLFVTLVGAMAEW |
| | ERETIRERTQMGKLAALKKGIMLTTPPFYYDRVDNKFVPNKYKEVVLFAYEEALKGKSAKSIARKL |
| | NNSDIPPPNNRKWEDRSITRALRSPFTRGHFEWGGVYLENNHEPIITEEMYNKIKDRLNERVNTKVV |
| | AHTSVFRGKLTCPTCGAKLTMNTNRKKTQNGYTTHKNYYCNNCKIMPNLKPVYIKEREVLRVFYD |
| | YLLNLNLEKYEIEEKQSEPEITVDIHKVMEQRKRYHKLYANGLMQEDELFDLIKETDEAIKEYESQT |
| | ENKVEKQFDIEGVKKYKKLLLEMWNVSTLEDKAEFVQMAIKSIEFDYIIDDGPPTGRKHSLKINQIIF |
| | Y |
| 172 | MLRIAIYSRKSVETDTGESIQNQIKLCKEYFKRQDPNCIFEIFEDEGYSGGNINRPSFQRMMELVKIK |
| | QFDIVAVYKIDRIARNIVDFVNTYDELDNIGVKLVSITEGFDPSTPAGKMMMLLLASFAEMERMNIA |
| | QRVKDNMRELAKMGRWSGGTPPKGYTTKKVIENGKKITYLDLIDDEAYIIKDAFKLYAEGYSTYKI |
| | NKHFKEKGIRLPQKTIQNMLNNPTYLISSKESVDFLKNKGYTVYGEPNGFGFLPYNRRPRTKGKKS |
| | WNDKSQFVGVSKHEGIIDLPLWIEVQNKLKERTVDPHPRESNFTFLSGGLLKCSCGSSMFVHPGHT |
| | RKDGSRLYYFRCMKNNGNCSNSKFLRVDYAESSILEFLESISSKEKLTEYQKKKKPRLDFSIEIKNLN |
| | KKIRDNSKAIDNLIDKLMILSNEAGKVVATKIEELTKQNNILKESLLEIERKKLLSGLEDNNLNILYN |
| | EIQNFIQTEDISLRRLKIKNIIKYITYNPQNDSLQVELVD |
| 173 | MATKARVYSYLRFSDPKQAAGSSADRQLEYAKRWAAEHGMTLDAALSMQDEGLSAYHQRHVTK |
| | GALGVFLAAIDEGRIPAGSVLIVEGLDRLSRAEPIQAQAQLAQIINAGITVVTASDGREYNRAGLKA |
| | QPMDLVYSLLVMIRAHEESDTKSKRVRAAIHRQCRGWQDGSWRGVIRNGKDPSWTRLEPETKTFQ |
| | LVPERAEAVKLAIRMFRDGHGAVRIMRTLAEEGLQLTNGGNPAGQLYRILRNRALIGEKVLEIDGE |
| | EYRLAGYYPSLLSAEQFADLQQATEQRAKQKGTGEIPGLITGLRISYCGYCGSAMVAQNLMNRGR |
| | REDGGPQHGHRRLICVGNSQGMGCAVAGSCSVVPIEHAIMSYCADQMNLARLFEGGDRSEALGGR |
| | LAIARARVADTTAKIERITDAMLADDAGDAPAAFMRRAREMEAALAAQQSEVEALEHEMAAIGSS |
| | PTPAVAKAWADLQEGVKALDYDARTKARQLVADTFERISIYHRGTEPEQTRSWKGTIDLVLVAKR |
| | GSARILHVDRQTGEWRGGEEVRDLPDDPVQ |
| 174 | MRCAIYRRVSTDEQAEKGHSLDNQKFRLESFAMSQGWEITGDYVDDGYSGKNMERPALKRMFAD |
| | IDNFDVILVYKLDRFTRSVRDLNDMLETIKGHEIAFKSVTEAIDTTTATGRMILNMMGSTAQWERE |
| | MISERIKDVLGKLAEQGIFPKGKPTYGYKIKNGVISIDEEEAKIVKLIFEKSKTLGQHAVSKYLRDNG |
| | IYTPSGSTWMSGGIGRIIRNPFYYGEMKVNGKLIAIKNEGYTPLISKEEFDLVNRISKSRNMKKTKRK |
| | SNIIYPFSGIALCPRCNKPLRGDRSKIGEKYYTYYRCMNAREGRCTIKRIKTQVIDIAFSEYVSGAFNE |
| | SNIQIDNKDESIALERKIEALKSKVDRLKELYIDGDITKVRYKEQTDAINIEINSMQDKMLSLDDGKI |
| | TEKAIEQAKELEKVWLLLDDKTKDESLRSVFDTITLKETEHGIIITSHSFL |
| 175 | MKLLVTYIRWSTKEQDSGDSLRRQTNLIDAFYSKHKNDYYLLPAHRYVDKGKSGFHQQHKNQGS |
| | DFRRMFENVMSGVIPEGSLIVVENFDRFSRADIDTAIDDVRQILRKGVSILTLGDGELYDKSALTDPV |
| | KLIKHIIIAERAHQESLVKQKRIAQVWNHKTQLARELKKPMGKQAPGWLELSDDGSHYIVDEDKAS |
| | LVNIIYDKRLSGMSMFAICKWLNEQGYPTINQRKVRISKTKKPDGNWSALSVKHILTSRSVLGYLPA |
| | KISTEDRKTVLREEIESFYPQIVTDSKFYAVQQLLEETGKGKTSSGEHWLYVNILKGLIRCKCGLVM |
| | TPTGIRKPVYQGTYRCNGNKESRCSYGTVSRKLLDTQLCSRLFSKLSQLHDEATDTAKLDELQRRL |
| | NIVDSELEKLTETLIQLPNITQIQEALRVKQGEKDELIVQLSREKARVKSVSSLNLSGLDMESVEGRT |
| | EAQIIIKRLVKEIVVSGNEKLVDIYLHNGNMIRGFPLDGKDDHTLTLEEATDEMQPLDDMLIFGEPV |
| | TRIYPAGDMEEVDA |
| 176 | MGKNGARVYSYLRFSDPRQATGSSADRQLAYASAWASKHGMELDATLTLRDEGLSAYHEAHVK |
| | QGALGAFLRAVDEGRIPAGSVLIVEGLDRLSRAEPLLAQAQLGQIVNAGITVVTASDGREYNREGL |
| | KAEPMNLVYSLLVMIRAHEESDTKSKRVKAAVRRQCEAWVAGSYRGRIVSGKDPQWLAWDGDS |
| | WQFIPERVEAVRFALDAYRSGIGAARLVRLMHEKGMVLSDWGIAAQQVYRLVRLPALRGAKRISI |
| | DGENFMLEDYYPRLLSDEEFSELETLVGQRYRRRGKDEIVGIVTGIGITRCGYCGTALVAQNLMQR |
| | VKADGSLEDGHRRLHCVSYSKNGGCNGGSCSSVPIERAVLAYCSDQMNLQRLLEPSSAGEDLRPR |
| | LVEAQKGVAEIERQLERVTDALLADDSGAAPLAFVRKARELEEDLERRRSAVQALEQELVAKSAS |
| | APAAGASKWAELAERAKSMADVDAREQARQLVMDTFETLVVYMRGVIPNPKGRYIDVMMKSRA |
| | GQTRWIRVDRRTGVWKKGADRPTTRRP |
| 177 | MGKNGARVYSYLRFSDPRQATGSSADRQLAYASAWASKHGMELDATLTLRDEGLSAYHETHVK |
| | QGALGAFLRAVDEGRIPVGSVLIVEGLDRLSRAEPLLAQAQLGQIVNAGITVVTASDGREYNREGL |
| | KAEPMNLVYSLLVMIRAHEESDTKSKRVKAAVRRQCEAWVTGSYRGRIVSGKDPQWLAWDGDS |
| | WQFIPERVEAVRFALDAYRSGIGAARLVRLMHEKGMVLSDWGIAAQQVYRLVRLPALRGAKRISI |
| | DGEDFMLEDYYPRLLSDEEFSELETLVGQRYRRRGKDEIVGIVTGIGITRCGYCGTALVAQNLMQR |
| | VKADGSLEDGHRRLHCVSYSKNGGCNGGSCSSVPIERAVLAYCSDQMNLQRLLEPSSAGEDLRLR |
| | LVEAQKGVAEIERQLGRVTDALLADDSGAAPLAFVRKARELEEDLERRRSAVQALEQELVAKSAS |
| | APAAGASKWAELAERAKSMADAEAREQARQLVMDTFETLVVYTRGVIPNPKGRYIDVMMKSRA |
| | GQTRWIRVDRRTGVWKEGADRPTTRRP |
| 178 | MGKNGARVYSYLRFSDPRQATGSSADRQLAYASAWASKHGMELDATLTLRDEGLSAYHEAHVK |
| | QGALGAFLRAVDEGRIPAGSVLIVEGLDRLSRAEPLLAQAQLGQIVNAGITVVTASDGREYNREGL |
| | KAEPMNLVYSLLVMIRAHEESDTKSKRVKAAVRRQCEAWVAGSYRGRIVSGKDPQWLAWDGDS |
| | WQFIPERVEAVRFALDAYRSGIGAARLVRLMHEKGMVLSDWGIAAQQVYRLVRLPALRGAKRISI |
| | DGENFMLEDYYPRLLSDEEFSELETLVGQRYRRRGKDEIVGIVTGIGITRCGYCGTALVAQNLMQR |
| | VKADGSLEDGHRRLHCVSCSKNGGCNGGSCSSVPIERAVLAYCSDQMNLQRLLEPSSAGEDLRPRL |
| | VEAQKGVAEIERQLERVTDALLADDSGAAPLAFVRKARELEEDLERRRSAVQALEQELVAKSASA |
| | PAAGASKWAELAERAKSMADVDAREQARQLVMDTFETLVVYMRGVIPNPKGRYIDVMMKSRAG |
| | QTRWIRVDRRTGVWKKGADRPTTRRP |
| 179 | MAVSRNVTVIPAIKRIGNNKNSESKPKIRVAAYCRVSTDSEEQASSYEIQIEYYTNYIKRNKEWELA |
| | GIFADDGITGTNTKKRDEFNRMIEECMAGNIDMIITKSISRFARNTLDCLKYIRQLKDKNIAVFFEKE |
| | NINTMDSKGEVLLTIMASLAQQESQSLSQNVKLGIQYRYQQGEVQVNHKRFLGYTKDENKQLVID |
| | PEGAKVVKRIYREYLEGASLLQIARGLEADGILTAAGKAKWRPETLKKILQNEKYIGDALLQKTYT |
| | VDFLSKKRVKNNGIVPQYYVENSHEPIIPRELFMQVQEEMVRRANIRGGKGGKKRVYSSKYALSSI |
| | VYCGQCGDIYRRVHWNNRGYKSIVWRCVSRLEEKGSECTAPTINEETLQAAVVKAINELLTNKEPF |
| | LSTLQKNIATVLNEENDNTTDDIDRRLEELQQQLLIQAKSKNDYEDVADEIYRLRELKQNALVENA |
| | DREGKRQRIAEMTDFLNKQSRELEEYDEQLVRRLIEKVTIYEAKLTVEFKSGIEIDEEI |
| 180 | MTVGIYIRVSTDEQVKEGFSISAQKEKLKAYCTAQGWEDFKFYVDEGKSAKDMHRPLLQEMITHIK |
| | KGLIDTVLVYKLDRLTRSVVDLHNLLSIFDEYNCAFKSATEVYDTSSAMGRFFITIISSVAQFERENT |
| | SERVSFGMAEKVRQGEYIPLAPFGYVKGPAGKLIVNEAEKEIFLHVVNMVSTGYSLRQTCEYLTNI |
| | GLKTRRSNDVWKVSTLIWMLKNPAVYGAIKWNNEIYENKHEPLINKATFNKLANILSIRSKSTTSRR |
| | GHVHHVFKGRLICPQCGKRLSGLRTKYVNKNKETFYNNNYRCATCKEHRRPAIQISEQKIEKAFID |
| | YISNYTLNKADISSKKIDNNLRKQEMIQKEIVSLQRKREKFQKAWAADLMSDDEFSKLMIDTKMEI |
| | DVAEDRKKEYDVSLFVSPEDIAKRNNILRELKINWTSLSPTEKTDFISMFIEGIEYVKNDENKAVITKI |
| | RFL |
| 181 | MSKLSKPKVYSYLRFSDPKQAAGSSADRQMEYAARWAAEHEMQLDASLTLRDEGLSAFHQRHIK |
| | QGALGVFLRAVEDGRILPGSVLVVEGLDRLSRAEPIQAQAQLAQIINAGITVVTASDGRRYNRERLK |
| | AQPMDLVYSLLVMIRAHEESDTKSKRVKAAIRRQCEGWVAGTWRGIVRNGKDPHWVRQVENGA |
| | FEFLPERELAIRTMIDLFLAGHGAIEIARILSERELYVSNAGNYSTHMYRIVRNRALIGEKSLTVDGEE |
| | FRLAGYYPALLTPDAFATLQEAMSERGRRKGKGEIPNILTGLSISSCGYCGLALVSQNTAIRPAKGR |
| | AFTRRLGCSGATFNTGCPVGGTCDARIVERALMHYCSDQFNLTRLLEGDDGAARRVAQLAVARQ |
| | RAGEIEMQIQRVTDALLSDDGVAPVAFMRRARELEGELEQQHREIEVLEHQIAASNAHEIPAAAEA |
| | WAQLVDGVLALDYGARMKARQLVADTFRKIVLFQRGFTPFNNAPADRWKRSGTIGLLLVTKRGG |
| | MRLLNIDRKTGQWEAEDNLDLAPHHADEIPLPPTVQGMEC |
| 182 | MSKLSKPKVYSYLRFSDPKQAAGSSADRQMEYAARWAAEHEMQLDASLTLRDEGLSAFHQRHIK |
| | QGALGVFLRAVEDGRILPGSVLVVEGLDRLSRAEPIQAQAQLAQIINAGITVVTASDGRKYNRERLK |
| | AQPMDLVYSLLVMIRAHEESDTKSKRVKAAIRRQCEGWVAGTWRGIVRNGKDPHWVRQVENGA |
| | FEFLPERELAIRTMIDLFLAGHGAIEIARILSERELYVSNAGNYSTHMYRIVRNRALIGEKSLTVDGEE |
| | FRLAGYYPALLTPDAFATLQEAMSERGRRKGKGEIPNILTGLSISSCGYCGLALVSQNTAIRPAKGR |
| | AFTRRLGCSGATFNTGCPVGGTCDARIVERALMHYCSDQFNLTRLLEGDDGAARRVAQLAVARQ |
| | RAGEIEMQIQRVTDALLSDDGVAPVAFMRRARELEGELEQQHREIEVLEHQIAASNAHEIPAAAEA |
| | WAQLVDGVLALDYGARMKARQLVADTFRKIVLFQRGFTPFNNAPADRWKRSGTIGLLLVTKRGG |
| | MRLLNIDRKTGQWEAEDNLDLAPHHADEIPLPPTVQGMEC |
| 183 | MKMKSVLYARVSTEDLEQNNSYIQQQLYQDDRFEIVKIFSDKASGSSVDGRESFLEMLKYVGISKE |
| | GNNYFVEHRTEIECIIVANVSRFSRSVVDARLIIDALHKNNVKVFFVDLNKFSDDADIFLQLNMYLM |
| | IEEQYLRDVSKKVKAGMQRKQSTGYILGSNKIWGYNYVTKDDGKGYLVPHETESLMVKNIFKEYI |
| | TGAGTRTLAKKYKLSSSTILGILKNTKYCGYMGYNLKSDNPTYVKSPFIEPLISTEAFEEVQRIIKGR |
| | CNSESGRGRRIKVRNLTGKIKCECGANYHYKQRETEWCCGREGVEGRTKGCGSPQFNTKLIIPYLE |
| | KNIDNIEKNLEFNLNREIKDINVGSFDRLNQRKEELIRQQDKLLDLYLDEDKLKNISKEMLERRSKLI |
| | KEEIEEVEEKLVILNDMSSHLNNLRRIKVEYKNEIKNIRRLIEEKNLDEIEKLISKIQLETIVNIINFRKE |
| | LRIKEIQFTCFNELYNTNFIFAPEPKKVWDK |
| 184 | MEKVAIYIRVSKKEQSRDKGSDSSLNLQLKKCLDYCKEKDYEVLKVYQDIESGRIDDRKEFNELFE |
| | AISKKIYTKIVFWEISRIARKISTGMKFFEELELYKITFDSISQPYLKDFMTLSIFLAWGTEDLKQMSL |
| | RIKSNLEEKTKAGYFVHGRPATGYIRGENKMIIPDPQKAPYILSIFETYAKNFNLTETARIFNKTRKDI |
| | VEIIDNKIYIGYVPFRKYIQELNQKKRTQVNKKDIKWYKGLHEPIVPLELFEFCQSIREKNIKSRAAY |
| | GDYKPHLLFSSMIYCECGDKMYQQKRNRTYKDNTNYVYYSYSCKNRKHKKSFSARIMDKTIKEMI |
| | LNSKELEDLNNYNSNDIEKSEKKLLKLENNLKLLENERERIINLFQKSYISEDELENKFKDLNTRIQIA |
| | KEKKIEFENTLNIPRNNDIKVLEKLKFIIENYDEEDVIETRKILKMIIKEIRVISFYPLKISILFY |
| 185 | MKTIHKLARPQLPEPPKLKVAAYARASTSSNEQLASLQTQITHYENHIQNNDQWEYVGVYYDEGT |
| | SGTKVEKRDGLHRLIKDAELGKIDLILTKSISSFSRNTVDCLNLVRKLTDIGVTIFFEKENINTGDMES |
| | ELLLSILSSLAESESYSHSENMKWANRKRMAKGIFKTVPPYGYQRKGADFYLIPDEAKVIEQIFKWA |
| | LEGVSAYQVAKRLNEKNIFTRKGSKWQDSGINNILHNIVYTGTMIHQRYFNDDQFRKKKNNGELP |
| | MYRIDNNHPPIISWEDYERVQELITLRANAKGTSKGSQKYSQRYVFTKRIICDKCGCNYKRVHIAGK |
| | GNTKVVKWSCTGHLKNKDGCDALPITDESLKTAYLTMLNKLILGHTIVLEPLINTPVEGKASKQEL |
| | EKLSIEITKIDEKLEVLASLNASGVVSTKTALEEQGRLQMELNKLQEKQHKIMESVNGTSTQRIQLE |
| | QLHQFTKRSEMLTEWDEDLFLRFAELIVVYSRQEVSFELKCGLLLKERLEA |
| 186 | MRKITTLDVTTSSAVKPKQKVAAYIRVSTSNEDQLISLEAQRRHYKTLIEKNVEWQLIDIYSDEGITG |
| | TKKDRRPELIRLISDCEKGKIDFILTKSISRFARNTIDCLELVRKLMDLGVHIYFEKENINTNSMESEL |
| | MLSILSSLAENESVSLSENSKWSIRQRFKRGTYKLSYPPYGYDYIDEQVIVNKKQAQVVKRIFNSVL |
| | EGVGTERIARQLNKEKIPTKRNGKWTGTTIRGIIKNEKYTGDVLLQKTYTDEHFNRKVNQGELDQY |
| | LIENHHEAIITHADIALVANRMLEYQASQKNIAVGSRKYLNRYPFSGKIECAECGDTFKRRIHTSTHS |
| | KYIAWCCSTHIKNKDECSMLFIREERIHQAFITMMNKLKFGYSYVLTSLSKQLETSNQDETYQKITEI |
| | EEQLEVIKDKLNTLIQLMAKGFLEPAIFNEQKIELSQRHMKLKEEREQLLYLINDGSNQLSEVKRLIK |
| | YFKQGKFIDAFDEESFQDIVKKIIVYSPNEIGFHLNCGITLREGVKR |
| 187 | MKRITKIEQDNANALMPKLRVAAYCRVSTASDDQLVSLEAQKTHYESYIKANPEWDFAGVYYDK |
| | GVTGTKTEGRDELLRLISDCENGLVDFIVTKSISRFSRNTLDCLELVRRLLDIGVFVYFEKENLNTQS |
| | MEGELMLSILSGLAESESVSISENNKWSAQKRFQNGTFKVAYPPYGYDNVDGQMVINEEQAEIVR |
| | WMFAQALAGKGAHKIASELNERGVPTRKGGNWTATTVRGLLANEKFTGDILFQKTYTDSQFNRH |
| | HNNGERDRYFMEDHHPAIVSRETFEAVAAVIGQRGKEKGVTRGSKYQNRYPFSGRIVCSECGSTFK |
| | RRIHYSTHQKYIAWCCSRHIEMIEACSMQFIRNDAVEAAFITMMNKLVYGHRTILRPLLDALRGTN |
| | DTGAYHKVAELESRMEEVMERSQVLTGLMTKGYLEPALFNKEKNALEAELENLQRQKDSLSRVL |
| | NGNLAKTEEVSRLLKFAAKAEMASDFDGDLIALKYVDRVVVYSRTEIGFELKCGLTLKERLVR |
| 188 | MKVPVWCYARISTLKQIDGFGIQRQINTINQFLQYVVLDHRLPFTLDVDNVTQMVAEGKSAFRGG |
| | NWKPSTKLGKYRKMVMDGVISDSVLIVENIDRLTRLDPFQAVEIISGLINRGTTILEIETGMTYSRYIP |
| | ESITVLTMQINRANGESKRKSIMMQKSHANRYGKVSKVRPRWFDVVEIDGIKQYRPNETAKAIQR |
| | MYNDYINGIGAAHIVRTYGNTDNGKAWTLVTVLRALSDKRVADDARYPPIIDKELYDSVQALKAA |
| | TNKKGNTHQKNMLNIFSGMSRCPVCNQSIIVKRNSHGNLFTVCLGKRTNKTCEARSISYFALERPLL |
| | TAISGLDFSEVYKHEDKNVLTLRDQWIQNERDIAAFRERLNKASRHEKFAILDELEIMNREQEELTIR |
| | LKSVDVPKDIQLTFDDDKLDLDTNYRIELNNRIKKLIQHINIVREDVSKSSYTIYCTIKYWTDVISHL |
| | VIIDVNIKRTGTGGTNTLTTTLRSVSSLNMDGTVSGNPDSDAWEYWKSFLDGTIGLVDYKK |
| 189 | MRCAIYRRVSTDEQAEKGFSLENQKLRLESFATSQGWEVVEDYVDDGFSGKDTNRPALQRMFSNV |
| | DKFDVILVYKLDRFTRSVKDLNEMLETIKKNEIAFKSATESIDTTTATGRMILNMMGTTAQWERETI |
| | SERIKDVFGKLRENGIFSTGHPPYGYRCSGNKSIEIVEEQAEMVRYIYELSKTMGLFKISVELNRKGI |
| | KTRRNNKFGQSAVKRILHNPFYCGYMEVDNKWVPIKNEGYTPIISEEEFKTTQKILTKRTKAQTRSR |
| | SVSYYPFSGIVLCPECQRAMRGDRAKYGDYYYRYYRCVYGRENINCTNRKRIRAEQVDKAFAEYI |
| | SRSFENTTIKLDSRDIKSDIEYELKHLDSKIERLSDIYIEGDITKSKYNEKMNSLLNEKEKLKKDLTSC |
| | KEHVDAEFVRNQINKLESIWNLIDDKTKSESIRSIFDTIKIKQDKNTVTIMDHTLL |
| 190 | MKAAIYIRVSTQEQVENYSIQAQTEKLTALCRSKDWDVYDIFVDGGYSGSNMNRPALNEMLSKLH |
| | EIDAVVVYRLDRLSRSQKDTITLIEEYFLKNNVEFVSLSETLDTSSPFGRAMIGILSVFAQLERETIRD |
| | RMVMGKIKRVESGLPLTTAKGRTFGYDVVDTKLYVNKEEAQHLQLIYDIFEEEKSITFLQKRLKEL |
| | GFKVKSYSSYNKWLMNDLYIGYVSYSDKVHVKGVHEAIISEEQFYRVQEIFSRMGKNPNMNRDSS |
| | SLLNNLIACEKCGLSFVHRVKDTASRGKKYRYRYYSCKTYKHTHELEKCGNKIWRADKLEEIIIDR |
| | VKNYSFATRNLDKEDELDSINAKLQVEHSKKKRLFDLYMNGSYEVAELDKMMADIDAQINYYNS |
| | QIEANEELKRNKKVQESLAELATVDFDSLEFREKQIYLKSIINKIYISDEQVTIEWI |
| 191 | MKVAIYTRVSTLEQREKGHSIDEQERKLRSFCDINDWTVKDVYVDAGFSGAKRDRPELTRLLDDIS |
| | EFDLVLVYKLDRLTRSVRDLLDLLEVFENNNVAFRSATEVYDTTTAIGRLFVTLVGAMAEWERETI |
| | RERSLMGKRAAIKKGMILTAPPFYYDRVNNTYIPNQYKDVVLDVYNKVKKGYSIAHIARLYNNSD |
| | VKPPNGNEEWTTRMLMHALRNPVTRGHYQWGEIYIEDSHEPIITDEMYNTIIDRLDKHTNTKVVAH |
| | TSVFRGKLICPNCGYALTLNSQKRKRKNDTIVYKTYYCNNCKITKGMKPHHITETETLRVFKDHLS |
| | KIDLKQYETQEKEKQSHVTIDLSKVMEQRKRYHKLYASGMMQENELFELIKETDEMIEEYEKQRK |
| | QVDVKEFDIGKIKEIKNVLLKSWDIFTLEDKADFIQMSIKAINIEYTKLKRGKASNSMKIKDIEFY |
| 192 | MTILDTPPTFRGLPPADDDAEKWLAYLRVSTWREDKISLDLQRTAIQAWERRGPRRVVEYVEDPD |
| | VTGRNFKRKIMGCIRRVEAGEIRGIVVWKFSRFGRNDMGIAVNLARVEKAGGDLVSATEDVDART |
| | AVGRFNRRILFDLATFESDRAGEQWKETHQWRRAHGLPATGGRRLGYIWHPRRIPHPTDPGQWTI |
| | QREWYEVEERARDHIEDLYARKIGDGYPVPDGYGSLAAWLNGLGYRTGDGNPWRADSLRRYMLS |
| | GFAAGLLRVHHPDCRCDYTANGGRCTRWIHIDGAHEAIITPETWERYEAHVAERRRMTPRARNPT |
| | YPLTGLIRCGGCREGAAATSARRASGRVLGYAYMCGQSRNGLCENPVWVQRYIVEDEVRGWLAR |
| | EVAADVDAAPATPEPVERDNRRAREERERARLEGEHTRLTNALTNLAVDRAMNPESYPEGVFEAA |
| | RERIVKQKQAVAEALEALAAVEATPERAALMPLAVGLLEEWETFEAPETNGILRSLVRRVALTRGA |
| | KGKKGVEGSGETRIEVHPVWEPDPWADDAPQ |
| 193 | MNYERRYLRSCQVSTLEQKEHGYSIEEQERKLKSFCEINDWSVSDVFIDAGFSGAKRDRPELQRMM |
| | NDIKRFDLVLVYKLDRLTRNVRDLLDLLEVFEQNNVAFRSATEVYDTSTAMGRLFVTLVGAMAE |
| | WERETIRERVMMGKRAAIKQGMILTPPPFYYDRVDNTYIPNNYKKVVLWAYDEVLKGVSSKGIAR |
| | KLNDSDIPPPNGKRWEDRTITRALRSPITRGHYTWGDVFIENSHEPIITEEMYQQIKERLEERINTKIV |
| | SHVSVFRGKFICPRCGGTLTLNTVTRKRKKGYVTYKTYYCNTCKAKKESFGFSENEALRVFRDYLS |
| | ELDLDKYKVKTKQNDDVVTIDIDKIMEQRKRYHKLYAKGLMQEEELFELIKETDETIAEYEKQKEL |
| | VPRKSLDIDKIKKFKNALLESWKIFSLEDKADFIKMAIKSIDIEYVKLKNRHSIKINDIEFY |
| 194 | MLKRAALYIRVSTDQQAKHGDSLDAQIATLKDYVSTQDNLTIIDTYIDDGISGQKLYRDEFQRLLED |
| | IKKNRIDIILFTKLDRWFRNLRHYLNIQEILDNSGVTWLAVSQPFFNTDTAYGRSFVNQSMSFAELE |
| | AQMASERIKAVFENKIRKGEVVTGSVPFGYKICDKKLIPNENAPIAKDIFKHYSIHNSIRLTVEYLFN |
| | EYDITRSSRTIKHMLRNRKYIGEVSGNKNYCPPIVDKETFEKVQNLLDKNISSIAKRTYIFSGLVVCS |
| | CCGKKMTGRYRKRKYIKKDGTVMYYTKKVYRCNGNTYKRNKCPNKINIPEEILEEYLLNNIKADA |
| | ENIALAKQKKIAVSAPEKNNNSKILKKIERLKKAYLNEVISLDEYKKDRKELEQMIVQVKPKETIVFK |
| | SNWFKKNIESTYRDFDEEEKRFVWRSVLKNLIVDPHGKITINFLTKN |
| 195 | MKTIHKLARPQLPEPPKLKVAAYARVSTSSNEQLASLQTQITHYENHIQNNDQWEYVGVYYDEGIS |
| | GTKVEKRDGLHRLIKDAELGKIDLILTKSISRFSRNTVDCLNLVRKLTDIGVTIFFEKENINTGDMESE |
| | LLLSILSSLAESESYSHSENMKWANRKRMAKGIFKTVPPYGYQRKGADFYLIPDEAKVIEQIFKWAL |
| | EGVSAYQVAKRLNEKNIFTRKGSKWQASGINNILHNIVYTGTMLHQRYFNDDQFRKKKNNGELPM |
| | YRIDNNHPPIISWEDYERVQELITLRANAKGTSKGSQKYSQRYAFTKRIICDKCGCNYKRVHTAGK |
| | GNTKVVKWSCTGHLKNKDGCDALPITDESLKTAYLTMLNKLILGHTIVLEPLINTPVEGKASKQEL |
| | EKLSIEITKIDEKLEVLASLNASGVVSTKTALEEQGRLQMELNKLQEKQHKIMESVNGTSTQRIQLE |
| | QLHQFTKRSEMLTEWDEDLFLRFAERIVVYSRQEVSFELKCGLLLKERLEA |
| 196 | MNVAIYCRVSTLEQKEHGYSIEEQERKLKSFCEINDWTVADVFVDAGFSGAKRDRPELQRLMNGIK |
| | RFDLVLVYKLDRLTRNVRDLLDLLEIFEQNNVAFRSATEVYDTSTAMGRLFVTLVGAMAEWERET |
| | IRERTQMGKLAALKKGIMLTTPPFYYDRVDNKFVPNKYKEVVLFAYEEALKGKSSKSIARKLNNSD |
| | IPPPNNRKWEDRSITRALRSPFTRGHFEWGGVYLENNHEPIITEEMYEKVKDRLEERTNTKKIKHVSI |
| | FRSKLVCPVCDSKLTMNTHKVTLKDRVYYNKHYYCNNCKETPNLKPVYIRAEEVERVFYEYLQH |
| | QDLTQYEVVEDTEEKEVAIDINKVMQQRKRYHKLYANGLMNEDELAELIEETDAAIEEYKKQNEN |
| | KEVKQYSDEDITEYKSLLLEMWNISSDEEKAEFIQMAIKNIFIEYVLGKNDNKKKRRSLKIKDIEFY |
| 197 | MSKARVYSYLRFSDPKQAAGSSADRQIEYARRWAAERNLELDDTLSLRDEGLSAYHQRHVKQGA |
| | LGVFLSAAEGGRIAPGSVLIVEGLDRLSRAEPIQAQAQLAQIVNAGITVVTASDGKEYNRERLRSQP |
| | MDLVYSLLVMIRAHEESDTKSKRVKAALRRQCQQWIDGKWRGIIRSGRDPHWVEIRDGQFALVPE |
| | RVAAVREALALFSRGHGKTKILRTLTERGLSMSNAGNHGTFIYRLVRNPMLMGTRVFEIDKEEFRL |
| | EGYYPALLSPEEFAVLQHLADERKGTRVKGEIPGLLTGLGITHCGYCGAAMVAQNYMGRARKAD |
| | GTPQDGHRRLHCVSDSQNSGCVVAGSVSIVPIERAIMTFCADQMNLTKLVEGDDGSAAVAGRLAL |
| | ARQKARGLQAQLERLTTALLADDGNAPPATFLRRARELEEELSSERRAIESLEREVLASANTTAPAA |
| | ADVWAKLTHGVLALDYESRVRARQLVADTFSRIVIFHAGFRPGEGTEKRIGIQLVAKHGNVRMLD |
| | VDRKSGDWRAAEDFDLRALT |
| 198 | MKTAIYLRKSRADLEAEARGEGETLAKHRTTLLKIAKEMNLNVLSVREEIVSGESLVKRPEMLALL |
| | EEIEDNKYDVVLCMDMDRLGRGGMKEQGIILETFKRSNTKIMTPRKTYDLNDEWDEEYSEFEAFM |
| | ARKELKIITRRMQRGRVASVEAGNYLGTHAPFGYDIHRLNKRERTLTINSEEASVVRMIFDWYANE |
| | DMGANAIRSKLNDLGYKSKLGNEWNPYSILDILKNNVYIGKVTWQKRKEVKQPDAVKRSCARQD |
| | KSDWIIADGKHEPIIPESLFEQVQEKLNSRYHVPYNTNGIKNPLAGIIKCSKCGYSMVQRYPKNRKE |
| | TMDCKHRGCENKSSYTELIEKRLLEALKEWYINYKADFEKHKQDDKLKETQVIQINEAALRKLEKE |
| | LVDVQKQKSNLHDLLERGVYTVDMFLERSNVVSDRITEITSTMENLKKEIKTEIKKEKVKKDTIPQV |
| | EHVLDLYFKTDDPKKKNNLLKSVLEKAVYKKEKWQRLDDFELVLYPKLPQDGDI |
| 199 | MRTALYIRVSTEDQAREGYSIQAQKNKLEAYCVSQGWDIAGFYVDDGYSAKDLERPEMKRMIKHI |
| | KQGLIDCVLVYRLDRLTRSVLDLYKLLELFEKHNCKFKSATEVYDTTTAMGRMFITIVAALAQWE |
| | RENLAERVRMGLQEKARQGKWVINKAPFGYDIDRESDTLVINEKEAAVVRKIFDLYISGKGMSKIA |
| | VELNKSQIHTKSGFGWSDSKIKYILKNPVYIGTMRYNYRVNQENYFEVKNAVPAIISEETFEKAQKI |
| | MNKRSKVHPKAATSEFIFSGIARCARCGGPLSGKHGYSKRKTKTHKLKTYYCYNRRYGLCDLPYM |
| | SERFIEQQFLKLIETIEIQDEILDDLQHNDEDSKERIKAIQNELKAIEKRRIKWQYAWANETISDEDFA |
| | QRMKEENEKEEELKKELEKIQPKQGEMMSIDKLKELAKDIRNNWEYMEPLEKKSLLQMIVKEMVI |
| | DKISLQPKPESVKIVDIKFY |
| 200 | MDNTSYIIKYVALYLRKSRGEEDIDLEKHRFILREMCVKHGWKYVEYVEIANSETIEYRPKFKSLLS |
| | DVEEGIYDAVLVVDYQRLGRGELEDQGKIKRIFRDSETYIVTPEKIYNLVDDTDDLLVDVRGLLAR |
| | QEYKTTTKNLQRGKKIGARLGKWTNGPAPFPYVYTAAIKGLEVVPERNVIYQEMKSRVLGGESLE |
| | AIGWDFNRRGIPGPGPKKGLWHSNTIGRILISEVHLGKIISNKTKGSGHKKKKTQPLVINPREEWVV |
| | VENCHAAVKTEEEHMKLLAMLEKNQVVPNRAKAGTYALSGLVFCGKCKKMMRYNVRSDGYTT |
| | NSIKACNKYDHFGNYCTNSGVKVNILTDFIDREIIDYEQRIIDSDNYINTDVIEKLERIIREKEAQLTKL |
| | NRALSKIKEMYEMEEYTREEYEERKAKRQQEISALESELAVHRYEINYDSREKNKERMKLINSFKDI |
| | WSSESATEHDKNMIAKMIISRIEYIHDKGTNNLNISIQFN |
| 201 | MKVAIYTRVSTHEQSLHGFSIEEQERKLKQFCEFNDWKVYKIYTDAGYSGAKRDRPALNQLIQDV |
| | DKLDLVLVYKLDRLTRSVRDLLDILEILEKNDVSFRSATEVYDTSTAMGRLFVTLVGAMAEWERTT |
| | IQERTFMGRRAAAQKGLIKTTPPFFYDRVDNKFIPNEYSKVLRFAVDEIKKGTSLREITIKLNNSNYK |
| | PPIGNRWHRSVLRNALKSPVARGHYYFSDVFVENTHEPIISDEEYEEIRERISERTNSVVVRHTSVFR |
| | GKLVCPVCGNRCTLNTNKHVTQKRGTWYSKHYYCDRCKCDKSVENFNFSEEEVLKQFYTYISNFD |
| | LTNYEVEMAEEEEPEIEIDIDKINEERKRYHILFAKGLMREDELTPLIKDLDDMVAAYNKQIKENKIK |
| | VYDYEQIKNFKYSLLEGWERMDLELKAEFIKRAIKSIKIEYIKGVRGKRPNSINILDVDFY |
| 202 | MATKARVYSYLRFSDPKQAAGSSADRQLEYAKRWAAEHGMALDAALSMQDEGLSAYHQRHVTK |
| | GALGVFLAAIDEGRIPAGSVLIVEGLDRLSRAEPIQAQAQLAQIINAGITVVTASDGREYNRAGLKA |
| | QPMDLVYSLLVMIRAHEESDTKSKRVRAAIHRQCKGWQDGTWRGVIRNGKDPSWTRLDPETKAF |
| | QLVPERAEAVKLAIRMFRDGHGAVRIMRTLAEEGLQLTNGGNPAGQLYRILRNRALIGEKVLEIDG |
| | EEYRLAGYYPSLLSAEQFADLQQATEQRAKQKGTGEIPGLITGLRISYCGYCGSAMVAQNLMNRG |
| | RREDGGPQHGHRRLICVGNSQGMGCAVAGSCSVVPIEHAIMSYCADQMNLARLFEGGDRSEALAG |
| | KLAIARARVADTTAKVERITDAMLADDAGDAPAAFMRRARELETSLVEQQAEVDALEHELAAVA |
| | SSPTPAVAKAWADLQEGVKALDYDARTKARQLVADTFERISIYHRGTEPEQTRSWKGTIDLVLVA |
| | KRGSARILHVDRQTGEWRGGEEVRDLPDDPIQ |
| 203 | MNKVAIYVRVSTTMQAEEGYSIDEQIDKLKSYCKIKDWTVYDIYKDGGFSGGNIKRPAMERLISDA |
| | KRKKFDTVLVYKLDRLSRSQKDTLFLIEEVFDKNDISFLSLNESFDTSTAFGKAMIGILSVFAQLERE |
| | QIKERMLLGKIGRAKTGKSMMFSKVSFGYTYDKLKDELVVNQAESIIVRKIFDAYLGGLSLNKLRD |
| | YLNNNGIYRGDKPWNYQGLRRILSNPVYIGMIRYREEIYPGNHKAIIDIDDYNKTQEEIKKRQIKALE |
| | FSNNPRPFRSKYMLSGIAKCGYCGTPLQIILGSKRKDGTRNMRYQCINRFPRNTKGVTIYNDGKKCE |
| | SGFYEKADIEEFVINEIRSLQINYNKLDAMFDRHPTVNSDDIKKQIITLDNKLKRLNDLYINNMIELD |
| | DLKKQTQSLRKQKTILEDELLNNPAITQEKNKKHFKEMLATKDITKLDYETQKNIVNNLINKVFVK |
| | SGYIKIEWKIPFKKA |
| 204 | MRKVAIYSRVSTINQAEEGYSIQGQIEALTKYCEAMEWKIYKNYSDAGFSGGKLERPAITELIEDGK |
| | NNKFDTILVYKLDRLSRNVKDTLYLVKDVFTANNIHFVSLKENIDTSSAMGNLFLTLLSAIAEFERE |
| | QIKERMQFGVMNRAKSGKTTAWKTPPYGYRYNKDEKTLSVNELEAANVRQMFNMIISGCSIMSIT |
| | NYARDNFVGNTWTYVKVKRILENETYKGLVKYREQTFSGDHQAIIDEKTYNKAQIALAHRTDTKT |
| | NTRPFQGKYMLSHIAKCGYCGAPLKVCTGRAKNDGTRRQTYVCVNKTESLARRSVNNYNNQKIC |
| | NTGRYEKKHIEKYVIDVLYKLQHDKEYLKKIKKDDNIIDITPLKKEIEIIDKKINRLNDLYINDLIDLP |
| | KLKKDIEELNHLKDDYNKAIKLNYLDKKNEDSLGMLMDNIDIRKSSYDVQSRIVKQLIDRVEVTMD |
| | NIDIIFKF |
| 205 | MTDPTLTRSKKPAYIYARFSSLEQAKGFSLERQLTTARSYIERKGWQLAEELADEGRSAFKGSNRD |
| | EGAALFEFESRARSGHFKNGAVLVVESIDRLSRQGPKAAAQLIWSLNENGVDVASYHDDQVYRAG |
| | SGDMLEIFGLIIKASLAHEESDKKSKRAKASWEKKYGDIEAGSKKAITKQVPAWLTVTADNDIIENP |
| | ARVKVVREIFEWYVEGIGLHTIMKRLNERGEPAFSGRETSKGWSKSAINHVLSNRAVLGEFATQQG |
| | KHIPVVYYPQVVSRDLFNRAEAMRATKTRTGGSSKYQGNNLFAGIAKCEVCDGPMGFVRDGGISR |
| | YTTASGEQRVYKSKGHNYLICDAARRGFGCDNKVHAPYATLEAATLQQLLWATIDDEEAQADPK |
| | ADALRSKLDAVLHSIDLKNQQISNIIDSMAEAPSKAMAARVAALEAETDALGAECDELQKALAVQ |
| | TSAPSLRDDIAQLRDLTELMNSEDEDVRRAARLRTNASLKRVIDHMTIDRAANVTVMSMDVGVW |
| | QFDKLGNRIGGQAL |
| 206 | MKAAIYIRVSTQEQVENYSIQAQTEKLTALCRSKDWDVYDIFIDGGYSGSNMNRPALNEMLSKLHE |
| | IDAVVVYRLDRLSRSQRDTITLIEEYFLKNNVEFVSLSETLDTSSPFGRAMIGILSVFAQLERETIRDR |
| | MVMGKIKRIEAGLPLTTAKGRTFGYDVIDTKLYINEEEAKQLRLIYDIFEEEQSITFLQKRLKKLGFK |
| | VRTYNRYNNWLTNDLYCGYVSYKDKVHVKGIHEPIISEEQFYRVQEIFARMGKNPNMNRDSASLL |
| | NNLVVCSKCGLGFVHRRKDTMSRGKKYHYRYYSCKTYKHTHELEKCGNKIWRADKLEELIIDRV |
| | NNYSFASRNVDKEDELDSLNEKLKTEHTKKKRLFDLYISGSYEVSELDAMMADIDAQINYYEAQIE |
| | ANEELKKNKKIQENLADLATVDFDSLEFREKQLYLKSLINKIYIDGEQVTIEWL |
| 207 | MTVGIYIRVSTDEQVKEGFSISAQKEKLKAYCTAQGWEDFKFYVDEGKSAKDMHRPLLQEMITHIK |
| | KGLIDTVLVYKLDRLTRSVVDLHNLLSIFDEYNCAFKSATEVYDTSSAMGRFFITIISSVAQFERENT |
| | SERVSFGMAEKVRQGEYIPLAPFGYVKGPDGKLIVNEAEKEIFLHVVNMVSTGYSLRQTCEYLTNI |
| | GLKTRRSNDMWKVSTLIWMLKNPAVYGAIKWNNEIYENKHEPLIDKATFDKLANILSIRSKSTTSR |
| | RGHVHHVFKGRLICPQCGKRLSGLRTKYVNKNKETFYNNNYRCATCKEHRRPAIQISEQKIEKAFI |
| | DYISNYTLNKADISSKKLDNNLRKQEMIQKEIVSLQRKREKFQKAWAADLMSDDEFSKLMIDTKM |
| | EIDVAEDRKKEYDVSLFVSPEDIAKRNNILRELKINWTSLSPTEKTDFISMFIEGIEYVKNDENKAVIT |
| | KIRFL |
| 208 | MTVGIYIRVSTEEQANEGYSISAQRERLKAFCLAQNWHDYKFYVDEGISGRDTKRPQLKKMMEDI |
| | KAGHINVLLVYRLDRLTRSVRDLHRILDELEKYSCTFRSATEFYDTSTAMGKMFITIIAAIAEWESA |
| | NLGERVTMGQVEKARQGEWAAQPPYGFFKDDKHKLQIHKEEIKAVKLMVKKIREGMSFRQLAFY |
| | MDSTQYKPKRGYKWHVRTLLSLMHNPALYGAMYWKEQIYENTHQGIMTKEEFDQLQKIISSRQN |
| | YKSRNVSSHFVFQTKLICPDCGSRCTSERYTWKRKTDNAVEVRNSYRCQVCALNNPKSTPFSVREV |
| | KVDEALIEYMINFTVAPSEVVELNENDQLLDIKNNLRKIENQREKYQRAWANDLITDDEFKVRMDE |
| | SRLQFDSLQNDLKNIEGEKYDVVDIERYIEITKTFNDNYLNLTQEERRTFIQTFIESVKVEIVEHTKGK |
| | GYRNQKIRIADVSFY |
| 209 | MTVGIYIRVSTEEQAREGFSISAQREKLKAYCVSQDWTDYKFYVDEGKSAKDTNRPYLKLMLDHI |
| | QQGLIDVVLVYRLDRLTRSVKDLYKLLDLFDKNNCIFRSATEVYDTGSATGRLFITLVAAMAQWE |
| | RENLGERVSMGQVEKARQGEFSAPAPFGFRKQGETLIKDEKQGPILLDIIEKVKKGWSIRQVAKFLD |
| | ESEHMPIRGYKWHIGTILSILHNPALYGAFRWKDEIYEDSHEGYITKEEFEELQEILYSRQNFKKREV |
| | KSNFIFQTKLVCPQCGNRLGCERSVYFRKKDQKNVESHHYRCQSCALNYKPAVGVSEKKIEKALLT |
| | YMKNVTFDLKPIVKEEKDDSLEIQNQIKKIERKREKFQKAWASDLMTDEEFAARMSETKNAYEEL |
| | KKQLSEIQPNEDLTVDIKKAKKLVNEFKLNWSYLNHAEKREYVQSFIEKIEFEKKGLTPRIRNVSFY |
| 210 | MKVAIYTRVSTLEQKEKGHSIEEQERKLRAYSDINDWKIHKVYTDAGYSGAKKDRPALQEMLNEI |
| | DNFDLVLVYKLDRLTRSVKDLLEILELFENKNVLFRSATEVYDTTSAMGRLFVTLVGAMAEWERT |
| | TIQERTAMGRRASARKGLAKTVPPFYYDRVNDKFVPNEYKKVLRFAVEEAKKGTSLREITIKLNNS |
| | KYKAPLGKNWHRSVIGNALTSPVARGHLVFGDIFVENTHEAIISEEEYEEIKLRISEKTNSTIVKHNAI |
| | FRSKLLCPNCNQKLTLNTVKHTPKNKEVWYSKLYFCSNCKNTKNKNACNIDEGEVLKQFYSYLKQ |
| | FDLTSYKIENQPKEIEDVGIDIEKLRKERARCQTLFIEGMMDKDEAFPIISRIDKEIHEYEKRKDNDKG |
| | KTFNYEKIKNFKYSLLNGWELMEDELKTEFIKMAIKNIHFEYVKGIKGKRQNSLKITGIEFY |
| 211 | MKAAIYIRVSTQEQVENYSIQAQTEKLTALCRSKDWDVYDIFIDGGYSGSNMNRPALNEMLSKLHE |
| | IDAVVVYRLDRLSRSQRDTITLIEEYFLKNNVEFVSLSETLDTSSPFGRAMIGILSVFAQLERETIRDR |
| | MVMGKIKRIEAGLPLTTAKGRTFGYDVIDTKLYINEEEAKQLQLIYDIFEEEQSITFLQKRLKKLGFK |
| | VRTYNRYNNWLTNDLYCGYVSYKDKVHVKGIHEPIISEEQFYRVQEIFARMGKNPNMNRDSASLL |
| | NNLVVCGKCGLGFVHRRKDTVSRGKKYHYRYYSCKTYKHTHELEKCGNKIWRADKLEELIIDRV |
| | NNYSFASRNVDKEDELDSLSEKLKIEHVKKKRLFDLYISGSYEVSELDAMMADIDAQINYYEAQIE |
| | ANEELKKNKQIQENLADLATVDFDSLEFREKQLYLKSLINKIYIDGEQVTIEWL |
| 212 | MKKAIAYMRFSSPGQMSGDSLNRQRRLIAEWLKVNSDYYLDTITYEDLGLSAFKGKHAQSGAFSE |
| | FLDAIEHGYILPGTTLLVESLDRLSREKVGEAIERLKLILNHGIDVITLCDNTVYNIDSLNEPYSLIKAI |
| | LIAQRANEESEIKSSRVKLSWKKKRQDALESGTIMTASCPRWLSLDDKRTAFVPDPDRVKTIELIFK |
| | LRMERRSLNAIAKYLNDHAVKNFSGKESAWGPSVIEKLLANKALIGICVPSYRARGKGISEIAGYYP |
| | RVISDDLFYAVQEIRLAPFGISNSSKNPMLINLLRTVMKCEACGNTMIVHAVSGSLHGYYVCPMRR |
| | LHRCDRPSIKRDLVDYNIINELLFNCSKIQPVENKKDANETLELKIIELQMKINNLIVALSVAPEVTAI |
| | AEKIRLLDKELRRALVSLKTLKSKAVSSLGDFHAIDLTSKNGRELCRTLAYKTFEKIIINTDNKTCDI |
| | YFMNGIVFKHYPLMKTISAQQAISTLKYMVDGEVYF |
| 213 | MKKITKIDELPQGQLPNTKLRVAAYARVSTDSDEQLESLKAQREHYERYIKSNPEWVFAGLYYDEG |
| | ISGTKMEKRTELLRMIRDCKQGRIDFIITKSISRFARNTVDCLELVRKLIDIGVYIYFEKENLNTGDME |
| | SELMLSILSGFAAEESASISQNSKWSIQKRFQNGSYIGTPPYGYTNIDGEMVIVPEEAEIIKRIFSECLS |
| | GKGGGTIARGLNKDKIPARRGNHWSAGTVIDMLRNEKYMGDVLLQKTYTDSNYNRHPNTGEKDQ |
| | YYYKDNHEPIISREDFAKAQDLIDERAKMKCKGVKKNVYLNRYALSGKIVCGECGRNFRRKTNYS |
| | AGRSYIAWSCIGHIEDKESCSMLFLRDGEIKATLTTMMNKLAFSHKLILEPLFKSISQIDEESDRERM |
| | DAIDKRMEQLMEERNTLITLMAKGFLEPALFNQERNVLDSEIKNLTTEKTNLVTNSTSGVLRANDIK |
| | DLIDYVSADNFNGEYTEELFEEFVENIIVNSRDELTFNLKCGLSLKEKVVR |
| 214 | MVIPARKRVGSTAAKEKIKKLRVAAYCRVSTETEEQNSSYEVQVAHYTEFIKKNTEWEFAGIFADD |
| | GISGTNTKKREEFNRMIAECMDGNIDMVITKSISRFARNTLDCLQYIRQLKDKNISVYFEKENINTM |
| | DAKGEVLLTIMASLAQQESQSLSQNVKLGLQYRYQQGKVQVNHKRFMGYSKDEDGNLIIVPEEAE |
| | IIKRIYREYLEGQSLVGIGQGLEKDGILTAAGKPRWRPESVKKILQNEKYIGDALLQKTVTVDFLTK |
| | KRVKNEGHVPQYYVENSHEAIIPKDLFLQVQEEIHRRRNIYTGADKNKRIYSSKYALSAITFCGDCG |
| | DIYRRTYWNIHGRKEFVWRCVTRIEQGPEVCKNRTVKEDELYGAVMTATNRLLAGGDNMIRTLEE |
| | NIHAVIGDTTEYQISELNSLLEENQKELISLANKGKDYESLADEIDELREKRQTLLIEDASLSGENERI |
| | NELIEFVRDNKYCTLRYDDTLVRKIIQNVTVYEDHFVIGFKSGIEIEVE |
| 215 | MKAAIYIRVSTQEQIENYSIQAQTEKLTALCRSKDWDVYDIFIDGGYSGSNMNRPALNEMLSKLHEI |
| | DAVVVYRLDRLSRSQRDTITLIEEYFLKNNVEFVSLSETLDTSSPFGRAMIGILSVFAQLERETIRDR |
| | MVMGKIKRIEAGLPLTTAKGRTFGYDVIDTKLYINEEEAKQLQMIYDIFEEEKSITTLQKRLKKLGF |
| | KVKSYSSYNNWLTNDLYCGYVSYADKVHTKGVHEPIISEEQFYRVQEIFSRMGKNPNMNRDSASL |
| | LNNLIVCGKCGLGFVHRRKDTVSRGKKYHYRYYSCKTYKHTHELEKCGNKIWRADKLEELIIDRV |
| | NNYSFASRNVDKEDELDSLNEKLKTEHTKKKRLFDLYISGSYEVSELDGMMADIDARINYYEAQIE |
| | ANEELKKNKKIQENLADLATVDFDSLEFREKQLYLKSLINKIYIDGEQVTIEWL |
| 216 | MKVAIYTRVSSAEQANEGYSIHEQKKKLISYCEIHDWNEYKVFTDAGISGGSMKRPALQNLMKQL |
| | SYFDLVLVYKLDRLTRNVRDLLDMLEEFEQYNVSFKSATEVFDTTSAIGKLFITMVGAMAEWERET |
| | IRERSLFGSRAAVREGNYIREAPFCYDNIEGKLHPNEHAKVIDLIVSMFKKGISANEIARRLNSSKVH |
| | VPNKKSWNRNSLIRLMRSPVLRGHTKYGDMLIENTHEPVLSEHDYNAINDAISSKTHKSKVKHHAI |
| | FRGALVCPQCNRRLHLYAGTVKDRKGYKYDVRRYKCETCSKNKDVKNVSFNESEVENKFINLLKS |
| | YELNKFHIRKVEPVKKIEYDIDKINKQKINYTRSWSLGYIEDDEYFELMEEINATKKMIEEQTTENK |
| | QSVSKEQIQSINNFILKGWEELTIKDKEELILSTVDKIEFNFIPKDKKHKTNTLDINSIHFKF |
| 217 | MKVAIYTRVSSYEQATEGYSIHEQERKLKAFCEVQNWHNFKVFTDAGVSGGSMNRPALKRIMDNL |
| | EYYDLVLVYKLDRLTRNVKDLLEMLEKFEKYNVAFKSATEVFDTTTAIGKLFITMVGAMAEWERA |
| | TIRERALFGSRAAVREGNYIREAPFCYDNVDGKLVPNKHKWVIDYLVEQFKHGVSGNEIARQMNL |
| | KKVNVPKVKKWNRTSIIRLMKNPVLRGHTKYGDMYIENTHEPVLSESDYKRIIDVIENKTHRSKVK |
| | HHAIFRGVLTCPQCHNKLHLYAGKITDKKGYSYEVRRYKCDTCSKDKNVQTISFNESEVEDKFIEL |
| | LKTYDMNKFKVDIVEESTPKLDYDIDKIMKQREKLTRSWSLGYIEDDEYFSLMDETKEILDEVERG |
| | GTEVESTQTVTNEQLNMIDDILIKGWSKLNVEQKEELILSTVKEIAFDFVPRKDNESGKVNTLNIREI |
| | TFKF |
| 218 | MKAAIYSRKSKFTGKGESIENQIEMCKKYASDNEYDEIFIYEDEGFSGGNINRPEFKQMMKDAKSH |
| | KFDVIICYRLDRISRNVSDFSTLIDKLKLLNIGFISIKEQFDTTSPMGTAMMFISSVFAQLERETIAERI |
| | KDNMYELAKTGRWLGGTPPFGFISEQSLYSDTNGKQKKMFQLAPVGSECELIKYMYEKYLALGSL |
| | GKLQKHLSSKEIKTRNNATWDIKALQLILRNPVYVKSDEVVLSYLESKGAKVFGEVNGNGILSYNK |
| | KDSKDKYKDISEWILSVAKHNGLIDSSLWLLVQKKLDKNKSLAPRLVSNDSSGLLSRVLYCKKCG |
| | GKMIQKKGHTSVKTKEPFRYYVCLNKMNFKSCDSKNIRADILEKHVADKIIEETSDTGSLIKAIDDY |
| | KNKLQLDSGKSNNLNFIKKQILLKQTQINNLMENISKNPKLFDLFNSKIEELNSELKSLKFKKFEAES |
| | VKENTSNALKEIDASTQMLLNFKRLWMYADSSTKKLLIENIVDSVCYDADNKTADVKLICCKKKG |
| | AL |
| 219 | MKAAIYIRVSTQEQIENYSIQAQTEKLTALCRSKDWDVYDIFIDGGYSGSNMNRPALNEMLSKLHEI |
| | DAVVVYRLDRLSRSQRDTITLIEEYFLKNNVEFVSLSETLDTSSPFGRAMIGILSVFAQLERETIRDR |
| | MVMGKIKRIEAGLPLTTAKGRTFGYDVIDTKLYINEEEAKQLQMIYDIFEEEKSITTLQKRLKKLGF |
| | KVKSYSSYNNWLTNDLYCGYVSYADKVHTKGVHEPIISEEQFYRVQEIFSRMGKNPNMNRDSASL |
| | LNNLVVCGKCGLGFVHRRKDTVSRGKKYHYRYYSCKTYKHTHELEKCGNKIWRADKLEELIIDRV |
| | NNYSFASRNVDKEDELDNLNEKLKTEHTKKKRLFDLYISGSYEVSELDAMMADIDAQINYYEAQIE |
| | ANEELKKNKKIQENLADLATVDFDSLEFREKQLYLKSLINKIYIDGEQVTIEWL |
| 220 | MKAAIYIRVSTQEQIENYSIQAQTEKLTALCRSKDWDVYDIFIDGGYSGSNMKRPALNEMLSKLHEI |
| | DAVVVYRLDRLSRSQRDTITLIEEYFLKNNVEFVSLSETLDTSSPFGRAMIGILSVFAQLERETIRDR |
| | MVMGKIKRIEAGLPLTTAKGRTFGYDVIDTKLYINEEEAKQLQMIYDIFEEEKSITTLQKRLKKLGF |
| | KVKSYSSYNNWLTNDLYCGYVSYADKVHTKGVHEPIISEEQFYRVQEIFSRMGKNPNMNRDSASL |
| | LNNLVVCGKCGLGYVHRRKDTVSRGKKYHYRYYSCKTYKHTHELEKCGNKIWRADKLEELIIDR |
| | VNNYSFASRNVDKEDELDSLNEKLKTEHAKKKRLFDLYISGSYEVSELDGMMADIDAQINYYEAQI |
| | EANEELKKNKKIQENLADLATVDFDSLEFREKQLYLKSLINKIYIDGEQVTIEWL |
| 221 | MNYERRYLRSCQVSTLEQKEHGYSIEEQERKLKSFCEINDWSVSDVFIDAGFSGAKRERPELQRMM |
| | NDIKRFDLVLVYKLDRLTRNVRDLLDLLEIFEQNNVAFRSATEVYDTSTAMGRLFVTLVGAMAEW |
| | ERETIRERVMMGKRAAIKQGMILTPPPFYYDRVDNTYIPNDYKKVVLWAYDEVMKGNSSKAIARK |
| | LNDSDIPPPNGKRWEDRTITRALRSPITRGHYTWGDVFIENSHEPIITEEMYQQIKERLEERINTKIVS |
| | HVSVFRGKFICPRCGGTLTLNTVTRKRKKGYVTYKTYYCNTCKAKKQSFGFSENEALRVFRDYLS |
| | KLDLEKYEVKTKQKDDVVTIDIDKIMEQRKRYHKLYAKGLMKEEELFGLIKETDETIAEYEKQKEL |
| | VPRKSLDIDKIKKFKNALLESWEIFSLEDKADFIKMAIKSIDIDYVKLKNRHSIKINDIEFY |
| 222 | MENKIKCGIYARVSTDRQGDSIENQVGQGTEYIKRLGDEYDTENIEVFRDEAVSGYYTSVFDRAEM |
| | KRAIEYAREKKIQLLVFKEVSRVGRDKQENPAIIGMFEQYGVRVIAINDNYDSMNKDNITFDILSVL |
| | SEQESRKTSVRVSTARKQKAARGQWNGEPPYGYIVNPETKRLEIHEERGKIPPLVFDLYVNRGMGT |
| | FKVAEYLNKKGYVTKNGKLWSRETVNRLIRNQAYIGQVAYGTRRNVLKREYDERGAMTKKKVQI |
| | KINRQEWQIVEDAHPALVDKELFYKAQKILMSRTHERGGAKRAHHPLTGVLVCGSCGEGMVCQK |
| | RSFKDKEYRYYICKTYHKYGREACSQANINADDIERAVVEAVRNKISRLPADTLLITADREQDIKKL |
| | TSELKDNNSRRDKLMKDQLDIFEQRELFPDDLYRSKMIEIKNSIAHLEEEKEIIEKQIEGIKEKITESSS |
| | LQHIIEEFKELDIEDVGRLRVLIHETVGSITVKGDNLRIEYVYDFDS |
| 223 | MDRICIYLRKSRADEELEKTIGEGETLSKHRKALLKFAKEKKLNIVEIKEEIVSADSIFFRPKMIELLK |
| | EVETKRYIGVLVMDIQRLGRGDTEDQGIITRIFKESHTKIITPQKTYDLDDDLDEDYFEFESFMGRKE |
| | YKMIKKRMQGGRVRSVEDGNYIATNPPFGYDVHWINKSRTLKANSKESEIVKLIFKLYIKGNGAGT |
| | IAKHLNDLGYKTKFGNNFSNSSVIFILKNPVYIGKITWKKKDIKKSKDPNKVKDTRTRDKSEWIIAD |
| | GKHKAIIDSNIWNKAQEILSNKYHIPYKLANPPANPLAGLVICSKCNGKMVMRKYGKKLPHLICTN |
| | TKCNNKSARFDYIEKAILEGLEEYLKNYKVNVKGNGKKANLKPYEQQLNALSKELIVLNEQKLKLF |
| | DFLEREVYTEEIFLERSKNLDERINTSTLAINKIKKILDDEKKKNNKNDIVKFEKILEGYKETKDIQKK |
| | NELMKSLIFKIEYKKEQHQRNDDFDIRLFPKLLR |
| 224 | MKAAIYIRVSTQEQIENYSIQAQTEKLTALCRSKDWDVYDIFIDGGYSGSNMNRPALNEMLSKLHEI |
| | DAVVVYRLDRLSRSQRDTITLIEEYFLKNNVEFVSLSETLDTSSPFGRAMIGILSVFAQLERETIRDR |
| | MVMGKIKRIEAGLPLTTAKGRTFGYDVIDTKLYINEEEAKQLQMIYDIFEEEKSITTLQKRLKKLGF |
| | KVKSYSSYNNWLTNDLYCGYVSYADKVHTKGVHEPIISEEQFYRVQEIFSRMGKNPNMNRDSASL |
| | LNNLVVCGKCGLGYVHRRKDTVSRGKKYHYRYYSCKTYKHTHELEKCGNKIWRADKLEELIIDR |
| | VNNYSFASRNVDKEDELDYLNEKLKIEHAKKKRLFDLYINGSYEVSELDSMMNDIDAQINYYESQI |
| | EANEELKKNKKIQENLADLATVDFDSLEFREKQLYLKSLINKIYIDDEQVTIEWL |
| 225 | MKAAIYIRVSTQEQIENYSIQAQTEKLTALCRSKDWDVYDIFIDGGYSGSNMKRPALNEMLSKLHEI |
| | DAVVVYRLDRLSRSQRDTITLIEEYFLKNNVEFVSLSETLDTSSPFGRAMIGILSVFAQLERETIRDR |
| | MVMGKIKRIEAGLPLTTAKGRTFGYDVIDTKLYINEEEAKQLRLIYDIFEEEQSITFLQKRLKKLGFK |
| | VRTYNRYNNWLTNDLYCGYVSYKDKVHVKGIHEPIISEEQFYRVQEIFSRMGKNPNMNKESASLL |
| | NNLVVCSKCGLGFVHRRKDTVSRGKKYHYRYYSCKTYKHTHELEKCGNKIWRADKLEELIIDRVN |
| | NYSFASRNIDKEDELDSLNEKLKIEHAKKKRLFDLYINGSYEVSELDSMMNDIDAQINYYESQIEAN |
| | EELKKNKKIQENLADLATVDFNSLEFREKQLYLKSLINKIYIDDEQVTIEWL |
| 226 | MEDSSNKSVGIYVRVSTDEQAKEGFSISAQKEKLKAYCVSQGWANFKFYVDEGKSAKDTHRPSLE |
| | LLLRHIEQGIIDTVLVYRLDRLTRSVRDLYTLLDYFDKYNAVFRSATEVYDTGSATGRLFITLVAAM |
| | AQWERENLGERVKMGQNEKARQGQFSAPAPFGFIKEGKSLVKNHEQGEILLEIIDKVKKGYSTRQI |
| | ANYLDDSGLLPIRGYRWHPGTILTLLKNPILYGSFRWGDEIIEDTHEGYISKDEFDRIQEILKERSIVK |
| | KRDSYSVFIFQSKIVCAGCGNRLASERSKYFRKKDKQYVETNNYRCQTCAQNRKPSIMGSEKKFQK |
| | ALVKYMQNVTPKLEPKIPEEKKHDYEKVHQKILNLEKQRKKYQKAWSLDLMTDEEFEQLMYETK |
| | EALKSAQNELAAAHSSDSQNSQIDIERAKEIVKMFNENWSVLTNEEKRSIVQELIKHINFTKEDGEIII |
| | THIEFY |
| 227 | MSSVRRNQTPAITPKKRCAVYTRKSTDEGLDQEYNSLEAQRDAGLAFIASQRHEGWIAVDDGYDD |
| | GGYSGGNMERPGLRRLMIDIEAGKIDTVVVYKIDRLTRSLPDFAKLVDVFDRNGVSFVSVTQQFNT |
| | TTSMGRLTLNILLSFAQFEREVTGERIRDKIAASKAKGMWMGGVPPLGYDVVERKLVVNEREAVL |
| | VRDIFRRYAEHGSAARLVRELEIEGHTTKAWVTQSGRERLGRSIDQQYLFTLLRNRIYLGEICNHDT |
| | WYSAQHDPIISQELWDAAHAFIERRKQAPREHRAKHPALLAGLLFAPDGQRMLHSFVKKKNGRQY |
| | RYYVPYLHKRRNAGASLAPHTPDVGHLPAAEIEEAVLAQIHAALSSPQILIAVWRSCQQHPVGAAL |
| | DEAQVVVAMQRIGDVWSQLFPAEQQRITRLLIERVQLHGHGLDIVWREDGWIGFGADISTHPLIEES |
| | QERVEEVWA |
| 228 | MQAEEFSIPGADQPPTFRAAEYVRMSTEHQQYSTENQADKIREYAARRNIEIVRTYADEGKSGLRID |
| | GRRALQQLIKDVETGSADFQIILVYDVSRWGRFQDADESAYYEYICRRAGIQVAYCAEQFENDGSP |
| | VSTIVKGVKRAMAGEYSRELSAKVFAGQCRLIELGFRQGGPAGYGLRRVLVDQSGTLKGELARGE |
| | HKSLQTDRVILQPGPDDEVAVVNQIYRWFVADNMTELDIAERLNAQGTRTDLGRDWTRATIREVL |
| | SNEKYIGNNIYNRRSFKLKKHRVVNSPEMWIKKEGAFEGIVPPELFYTAQGILRARAHRYSDEELIE |
| | KLRNLYQRHGYLSGLIIDEAEGMPSSAAYAHRFGSLIRAYQTVGFTPDRDYQYLEANQFLRRLHPEI |
| | VGQTERMIAEVGGMVERDPATDLLTVNREFTVSLVLARCQLLDNGRRRWKVRFDTSLAPDITVAV |
| | RLDDSNQAALDYYLLPRLDFGQARIHLADHNGIEFECYRFDSLDYLYGMARRIRIRRAA |
| 229 | MKAAIYIRVSTQEQIENYSIQAQTEKLTALCRSKDWDVYDIFIDGGYSGSNMNRPALNEMLSKLHEI |
| | DAVVVYRLDRLSRSQRDTITLIEEYFLKNNVEFVSLSETLDTSSPFGRAMIGILSVFAQLERETIRDR |
| | MVMGKIKRIEAGLPLTTAKGRTFGYDVIDTKLYINEEEAKQLQMIYDIFEEEKSITSLQKRLKKLGF |
| | KVKSYSSYNNWLTNDLYCGYVSYADKVHTKGVHEPIISEEQFYRVQEIFSRMGKNPNMNRDSASL |
| | LNNLVVCSKCGLGFVHRRKDTVSRGKKYHYRYYSCKTYKHTHELEKCGNKIWRADKLEELIIDRV |
| | NNYSFASRNVDKEDELDNLNEKLKTEHTKKKRLFDLYISGSYEVSELDAMMADIDAQINYYEAQIE |
| | ANEELKKNKKIQENLADLATVDFNSLEFREKQLYLKSLINKIYIDGEQVTIEWL |
| 230 | MGKNGARVYSYLRFSDPRQATGSSADRQLAYASAWASKHGMELDATLTLRDEGLSAYHETHVK |
| | QGALGAFLRAVDEGRIPAGSVLIVEGLDRLSRAEPLLAQAQLGQIVNAGITVVTASDGREYNREGL |
| | KAEPMNLVYSLLVMIRAHEESDTKSKRVKAAVRRQCEGWVTGSYRGRIVSGKDPQWLAWDGDS |
| | WQFIPERVEAVRFALDAYRSGIGAARLVRLMHEKGMVLSDWGIAAQQVYRLVRLPALRGAKRISI |
| | DGEDFMLEDYYPRLLSDEEFSELETLVGQRYRRRGKDEIVGIVTGIGITRCGYCGTALVAQNLMQR |
| | VKSDGSLEDGHRRLHCVSYSKNGGCNGGSCSSVPIERAVLAYCSDQMNLQRLLEPSSAGEDLRPRL |
| | VEAKKGVAEIERQLERVTDALLADDTGAAPMAFVRKARELEEDLERRRSAVRALEQELVTKSAST |
| | PAAGASKWAELAERAKSMTDVEAREQARQLVMDTFETLVVYMRGVMPTPKGRHIDLMMRSRAG |
| | QTRWLRVDRRSGVWRESGDSSRRLEG |
| 231 | MKMKSVLYARVSTEDLEQNNSYIQQQLYQDDRFEIVKIFSDKASGSSVDGRESFLEMLKYVGISKE |
| | GNNYFVEHRTEIECIIVANVSRFSRSVVDARLIIDALHKNNVKVFFVDLNKFSDDADIFLQLNMYLM |
| | IEEQYLRDVSKKVKAGMQRKQSTGYILGSNKIWGYNYVTKDDGKGYLVPHETESLMVKNIFKEYI |
| | TGAGTRTLAKKYKLSSSTILGILKNTKYCGYMGYNLKSDNPTYVKSPFIEPLISTEAFEEVQRIIKGR |
| | CNSESGRGRRIKVRNLTGKIKCECGANYHYKQRETEWCCGREGVEGRTKGCGSPQFNTKLIIPYLE |
| | KNMDNIEKNLQFNLNREIKDINVGSFDRLNQRKEELIRQQDKLLDLYLDEDKLKNISKEMLERRSK |
| | LIKEEIEEVEEKLVILNDVNSHLNNLRRIKVEYKNEIKNIRRLIEEKNLDEIEKLISKIQLETIVNIINFR |
| | KELRIKEIQFSCFNELYNTNFIFAPEPKKVK |
| 232 | MNNKVAIYVRVSTHHQIDKDSLPLQRQDLINYTKYVLNINEYELFEDAGYSAKNTDRPNFQNMMT |
| | KIRNNEFSHLLVWKIDRISRNLLDFCDMYEELKKYNCTFVSKNEQFDTSSAMGEAMLKIILVFAELE |
| | RKLTGERVTAVMLDRASKGLWNGAPIPLGYVWDKVKKFPIIDRTEKSTIELIYNTYLKAKSTTEVR |
| | GLLNANGIKTKRGGSWTTKTVSDIIRNPFYKGTYRYNYKEPGRGKIKNKNEWIVIEDNHPGIIEKEL |
| | WKKCNEIMDVNAQRNNASGFRANGKVHVFAGILECGECYKNLYAKQDKPNIEGFRPSIYVCSGRY |
| | NHLGCSQKTISDNYVGTFIFNFISNILTVQRKIKKLDLEVLEKTLIKGKAFTNVVGIENIEVLQQLSYS |
| | ESTFKSKNIEDKENSFELEVIKKEKSKYERALERLEDLYLFDDESMSEKDYVLKKNKINEKLNDANE |
| | KLRKIDNYNDISELNLEKEASDFMLSKQLLNTECINYKNLVLNVGRDILKEFVNTIIDKIIVKDKKISS |
| | VKFKSGLVIKFVYKC |
| 233 | MNVAIYLRKSRADEEAEKQGEFETLSRHKSTLLKLAKEQNLDVIEIKEELVSGESIIHRPKMLELLKE |
| | VEENKYDAVLVMDLDRLGRGDMKDQGIILETFKESKTKIITPRKTYDLTDEFDEEYSEFEAFMARK |
| | ELKLISRRMQRGRIKSVEEGNFIGTSAPFGYDAVTTGRKERILVPNKDADVVRTIFDLYINEDMGCS |
| | KISKYLNNLGIKTATGANWYNSAITNIIKNKVYCGYIQWQKKDYKKSKNPNKIKTVKLRPKDEWIE |
| | AKGKHEPLISEITWKKAQNILKKNGHVSYGNQIKNPLAGIVICKNCARPLVYRPYADHDYIICYHPG |
| | CNKSSRFEFIEAAILKSLEDTVKKYQLKASDLDLDKNNKDSNIEFQKRVLKGLETELKELGKQKNK |
| | LYDLLERGIYDEDTFIERSNNISSRTEEIKDSINTVKNRLSTVKKDNSKIIEDIKTVLSLYHDSDSLGKN |
| | KLLKSVIDKAVYYKSKEQKLDSFELMVHLKLHEDQ |
| 234 | MSVIVTKKRCAVYTRVSTDERLDQSFNSLDAQREAGQAYIAAQRHEGWLPVDDDYDDGGYSGGN |
| | MERPALKRLLALIATDQIDVVVVYKIDRLTRSLVDFARLIEAFERHKVSFVSVTQQFNTTTSMGRL |
| | MLNILLSFAQFEREVTGERIRDKIAASKRKGMWMGGYPPLGYDLKDRKLFVNEREAPTVQRIFERF |
| | AALGSVTELCRELAQDGVKTKAWQTRDGRMRNGTVMDKQYLSKALRNPVYVGEIRHKNVVHAG |
| | QHTPIISRQLWDRVQAILAADADQRAGMTRTRGKCDALLRGLLFGPNGEKYYPTFTKKASGKRYR |
| | YYYPQSDKKYGFGSSALGMLPADQIEEVVVNLVIQALQSPESMQAVWDHVRQNHPEIDEPTTVLA |
| | MRQLGEVWKQLFPEEQVRLINLLIERIDVLPDGIDIAWREIGWKELAGELAPDTIGSEMLEVERSQ |
| 235 | MKGESELDKKAAIYIRVSTQEQATEGYSIQAQTDRLTKYVEAKDFILYKKYIDAGYSASKLERPAM |
| | QELIQDVQSKKVDVVIVYKLDRLSRSQKDTMYLIEDIFRPNDVELISMQESFDTSTAFGSATVGMLS |
| | VFAQLERKSISERMITGRVERAKKGFYHTGGQDRPPAGYQFNSDNHLIINEYEAAAIKDLFRLYND |
| | GLGKSSISEYLKKNYPGKNKWLPSSIDRMLKNSLYIGKVKFSGVEYDGIHEPIIDEVTFYKTQKEIAR |
| | RKQSNTKRYNYVALLGGLCECGICGAKMANRRAVGRKGKVYRYYRCYSKKGSPKHMMKTDGCS |
| | SKAQQQFIIDEAVINNLKNIDVEAELKRRSAPQTNTSLISSQIESIDKQINKLIDLFQVDSMPLDVISEK |
| | IDKLNKEKQSMEKLLERKNRLDKTELQHRFDVLKSFDWDNSSIESKRVVIEMLVQKVIIHDNSIEIIL |
| | VE |
| 236 | MKTIHKLARPQLPEPPKLKVAAYARVSTSSNEQLASLQTQITHYENHIQNNDQWEYVGVYYDEGIS |
| | GTKVEKRDGLHRLIKDAELGKIDLILTKSISRFSRNTVDCLNLVRKLTDIGVTIFFEKENINTGDMESE |
| | LLLSILSSLAESESYSHSENMKWANRKRMAKGIFKTVPPYGYQRKGADFYLIPDEAKVIEQIFKWAL |
| | EGVSAYQVAKRLNEKNIFTRKGSKWQASGINNILHNIVYTGTMLHQRYFNDDQFRKKKNNGELPM |
| | YRIDNNHPPIISWEDYERVQELITLRANAKGTSKGSQKYSQRYAFTKRIICDKCGCNYKRVHTAGK |
| | GNTKVVKWSCTGHLKNKDGCDALPITDESLKTAYLTMLNKLILGHTIVLEPLINTPVEGKASKQEL |
| | EKLSIEITKIDEKLEVLASLNASGVVSTKTSLEEQGRLQMELNKLQEKQHKIMESVNGTSTQRIQLEQ |
| | LHQFTKRSEMLTEWDEDLFLRFAERIVVYSRQEVSFELKCGLLLKERLEA |
| 237 | MKVAIYCRVSTLEQKEHGYSIEEQERKLRSYCDINDWNVKDVYVDAGFSGAKRDRPELQRMMND |
| | IKRFDLVLVYKLDRLTRNVRDLLDLLEIFEQNNVAFRSATEVYDTSTAMGRLFVTLVGAMAEWER |
| | ETIRERTQMGKLAALKKGIMLTTPPFYYDRVDNKFVPNKYKEVVLFAYEEALKGKSAKSIARKLN |
| | NSDIPPPNNRKWEDRSITRALRSPFTRGHFEWGGVYLENNHEPIITEEMYEKVKDRLEERTNTKKIK |
| | HVSIFRSKLVCPVCDSKLTMNTHKVTLKDRVYYNKHYYCNNCKETPNLKPVYIRSEEVERVFYEY |
| | LQHQDLTEYDIVEDKEEKEVAIDINKVMQQRKRYHKLYANGLMNEDELAELIEETDIAIEEYKKQS |
| | ENEEVKQYDTEDIKQYKNLLLEMWDISSDEEKAEFIQMAIKNIFIEYVLGKNDNKKKRRSLKIKDIE |
| | FY |
| 238 | MKTAIYLRKSRADLEAEARGEGETLAKHRSTLLKIAKEMNLNVLAVREEIVSGESLVKRPEMLALL |
| | EEIEDNKYDVVLCMDMDRLGRGGMKEQGIILETFKRSNTKIMTPRKTYDLNDEWDEEYSEFEAFM |
| | ARKELKIITRRMQRGRIASVEAGNYLGTHAPFGYDIHRLNKRERTLTMDPEEASVVRMIFDWYANE |
| | DMGASAIRNKLNDLGYKSKLGNEWNPYSILDILKNNVYIGKVTWQKRKEVKRPDAVKRSCARQD |
| | KSDWIIADGKHEPIIPESLFEQVQEKLNSRYHVPYNTNGIKNPLAGIIKCSKCGYSMVQRYPKNRKE |
| | TMDCKHRGCENKSSYTELIEKRLLEALKEWYINYKADFEAHKQGDKLKETQVIQMNEAALRKLEK |
| | ELVDVQKQKNNLHDLLERGVYTVDMFLERSQVISDRINEITSTMENLKKEIKTEIKKEKVKKDTIPQ |
| | VEHVLDLYFKTDDPKKKNSLLKSVLEKAVYKKEKWQRLDDFELVLYPKLPQDGDI |
| 239 | MKQIAIYIRKSVKGDENSISLEAQTEIIKHYFKGENNFIIYKDDGFSGGNTNRPAFQKLMADAVENK |
| | FDTIACYKLDRIARNTLDFLTTFNLLKEYNIDLICVEDKYDPSTPAGRLMMTLLASLAEMERENIKQ |
| | RVSDSMLNLAKQGRWTGGTPPFGYKVITLDGGKYLEIEDKNNIKYIFNEFINGKSIIKLGNEFNCNK |
| | KKISRILHNITYLQSSKDASIYLKQILGYEVIGESNGYGYLPYGNYKVVNGKKIKNTDGLKIACISRH |
| | EAIIDLNTFIKVQEKLKTFEGKKAPRISTKSFLAQMVQCTCGSNMLIVLGHKKKDGSRKLYFSCPNK |
| | CGNNFATVKEIEDDTLTVLKNVDFFNKIRQNNTNLNKDNSKIKSTILKELEEKKKLLDGLVNKLAL |
| | VDSSLANVLIEKMESLNIDIKNLQNKIDLLEKEEIASSYNKEDFNLKEESRKHFIEQFENMDTKERQN |
| | AIRGVINKIIWTGKNIIIS |
| 240 | MGEETDYNPADWIDLFCRKSQAVKSKASRGRKQELSISAQETLGRRVAALLGKQVRHVWKEVGS |
| | ASRFRRKGARTDQDQALAAVVKGEVGALWCYRLDRWDRRGAGAILHIIEPEDGIPRRILFGWNEE |
| | TGRPELDSSNKRDRGELIRSAERAREETEVLSERIKNTKDHQRANGEWVNARAPYGLEVVLVETLD |
| | EEGDLYDERRLRVSAELSGDPKGRTKAEIARLWHTLPVTDGLSLRSIAERLSDEGVPNPSGTAGWA |
| | FATGRDIINNPAYAGWQTTGRQEGQNQRRRVFRDENGDKLSVMAGEALVTDEEQLAAKEAVQGE |
| | EGIGVPNDGSEHSVKAKHLMTDASYCESCEGSMPWAGTGYGCWKTKSGQRAACEKPAFVARKA |
| | AEEYIGKRWQDRLIHAEPDDPILIEVAKRYRAAKNPKTSEHESEVLDALARAETALKRVWADRKG |
| | GLYDGPSEEFFKPDLDEATERVTAIQSELERVRGGSNKVDVSWIFDPDLVRHTWERADEKTRRMLL |
| | RLAIDEIWISKAAYQGQPFDGDSRITINWHGESPARRRVKTRKLPSGKVVPLIRPQKGK |
| 241 | MKVAAYCRVSTDQEEQLSSYENQVNYYREFISKHEDYELVDIYADEGISATNTKKRDAFNRLIQDC |
| | RAGKVDRILVKSISRFARNTLDCIKYVRELKELGVGVSFEKENIDSLDSKGEVLLTILSSLAQDESRSI |
| | SENATWGIRKKFERGEVRVNTTKFMGYDKDDNGRLIINPQQAETVKFIYEKFLDGYSPESIAKYLN |
| | DNEIPGWTGKANWYPSAIQKMLQNEKYKGDALLQKTITVDFLTKKRVQNDGQVNQYYVENSHEA |
| | IIDKDTWELVQLELERRKAYREEHQLKSYIMQNDDNPFTTKVFCAECGSAFGRKNWATSRGKRKV |
| | WQCNNRYRVKGQIGCQNNHIDEETLEKAVVIAVELLSENVDLLHGKWNKILEENRPLEKHYCTKL |
| | AEMINKTSWEFDSYEMCQVLDSITISEDGQISVKFLEGTEVDL |
| 242 | MNVAAYCRVSTDQDEQLSSYENQVNYYRDYISKHEDYELVDIYADEGISATNTKKRDAFNRLIQD |
| | CRAGKVDRILVKSISRFARNTLDCIKYVRELKDLGIGVT1AEKENIDSLDSKGEVLLTILSSLAQDESRS |
| | ISENATWGIRKRFERGEVRVNTTKFMGYDKDKDGNLIINREQAKVVRYIYEQFLKGYTPESIARDL |
| | NDQEVPGWSGKANWYPSSILKMLQNEKYKGDALLQKTYTVDFLTKKRTENDGQVNQFYVANNH |
| | EGIIDHEMWETVQLEIARRKAFREEHGIPFYHLQNEDNPFMTKVFCAECGDAFGRKNWTTSRGKR |
| | KVWQCNNRYRVTGVMGCSNNHIDEEMLEKAFMKAVSILNDHKTDVLDKLERLSKGDNLLHKHY |
| | AKFMNQLLDLDHFDSTIMCEILDNITISESGEIRISFLEGTQVDL |
| 243 | MKAAIYIRVSTQEQIENYSIQAQTEKLTALCRSKDWDVYDIFIDGGYSGSNMNRPALNEMLSKLHEI |
| | DAVVVYRLDRLSRSQRDTITLIEEYFLKNNVEFVSLSETLDTSSPFGRAMIGILSVFAQLERETIRDR |
| | MVMGKIKRIEAGLPLTTAKGRTFGYDVIDTKLYINEEEAKQLRLIYDIFEEEQSITFLQKRLKKLGFK |
| | VRTYNRYNNWLTNDLYCGYVSYKDKVHVKGIHEPIISEEQFYRVQEIFARMGKNPNMNRDSASLL |
| | NNLVVCGKCGLGFVHRRKDTVSRGKKYHYRYYSCKTYKHTHELEKCGNKIWRADKLEELIIDRV |
| | NNYSFASRNVDKEDELDSLSEKLKIEHVKKKRLFDLYISGSYEVSELDAMMADIDAQINYYEAQIE |
| | ANEELKKNKQIQENLADLATVDFDSLEFREKQLYLKSLINKIYIDGEQVTIEWL |
| 244 | MKVAAYCRVSTDQEEQLSSYENQVNYYRDYISKHEDYELVDIYADEGISATNTKKRDAFNRLIQD |
| | CRAGKVDRILVKSISRFARNTLDCIKYVRELKELGVGVTFEKENIDSLDSKGEVLLTILSSLAQDESR |
| | SISENATWGIRKKFERGEVRVNTTKFMGYDKDENGRLIINPGQAETVKFIYEKFLEGYSPESIAKYL |
| | NDNEIPGWTGKANWYPSAIQKMLQNEKYKGDALLQKTFTVDFLTKKRVQNDGQVNQYYVENSH |
| | EAIIDKDTWELVQLELARRKDFREEHQLKAYIIQNDDNPFTTKVFCKACGSAFGRKNWTTSRGKRK |
| | VWQCNNRYRVKGQIGCQNNHIDEETLEKAVVMAVELLSENVDLLHGKWNKILEENRPLEKHYCT |
| | KLAEMINKPLWEFDSYEMCQVLDSITISEDGQISAKFLEGTEVDL |
| 245 | MIIYLNKIILGGSSLTTGIYIRVSTEEQAKEGYSIANQKEKLIAFCESQGWSSYKIYSDEGYSAKDMK |
| | RPALQEMFNDMTQGVIKIILVYKLDRLTRSVRDLYTMLETFDKHDCKFKSATEVYDTTTAMGRLFI |
| | TLVAALAQWERENTAERVRVVMENNVKNGKWKGGTLAYGYQLKNGNIVINEDEAATVSFIFNKI |
| | KFTGPLAIVRELIKKNIPTRTGSDWHVDTIRGIITNPFYIGYQRFNDSLKQYKGSVKQQKLYKSSHESI |
| | ISEDEFWEVQEILNARKTHGSKKSTSTYYFSTVLTCGVCGASMCGHLSGNKKTYRCNKKKTSGNC |
| | DSSLILESTIVNWLLTNLESISKMLINNTITNTKGTITKEKHVNDFQKELKKITKLKEKHKTMYENDII |
| | DIAELIEQTNKYRHREKEIKEIIHNIDKQDEKNEILKATLYNFNDAWAAATEPERKFLINSIFQNISIHA |
| | IGVHTRTKPRDIVISSIY |
| 246 | MKAAIYIRVSTQEQIENYSIQAQTEKLTALCRSKDWDVYDIFIDGGYSGSNMNRPALNEMLSKLHEI |
| | DAVVVYRLDRLSRSQRDTITLIEEYFLKNNVEFVSLSETLDTSSPFGRAMIGILSVFAQLERETIRDR |
| | MVMGKIKRIEAGLPLTTAKGRTFGYDVIDTKLYINEEEAKQLQMIYDIFEEEKSITSLQKRLKKLGF |
| | KVKSYSSYNNWLTNDLYCGYVSYADKVHTKGVHEPIISEEQFYRVQEIFSRMGKNPNMNRDSASL |
| | LNNLVVCGKCGLGFVHRRKDTVSRGKKYHYRYYSCKTYKHTHELEKCGNKIWRADKLEELIIDRV |
| | NNYSFASRNVDKEDELDSLNEKLKIEHTKKKRLFDLYISGSYEVSELDAMMSDIDAQINYYEAQIEA |
| | NEELKKNKKIQENLADLATVDFNSLEFREKQLYLKSLINKIYIDDEQVTIEWL |
| 247 | MVIVAYAVYVRVSSDKDEQVSSVENQIDICRYWLENNGFEWDENAVYFDDGISGTAWLERHAIQL |
| | VLEKARKKEIDTVVFKSIHRLARDLKDALEIKEILLGHGVRLITIEEGYDSHYEGKNDMKFEMYAM |
| | FASQLPKTLSVSITAALAAKVRRGGYTGGFVPYGYEIIDGKYAINEEEAALVREIFELYAQGFGYIKI |
| | ANTINDKGARTRKGAPWTFSTLSKMIKNPAYKGTYIMQKYGTVKVNGRKKKVINPKEKWVIFEGH |
| | HPAIISHELWEKVNNKDPNKFKKKRRVSTTNELRGITVCAHCGTAMSKRNSINVSKNGRETEYSYM |
| | ICNWSRITARRECVRHVPIHYKDLRALVLSKLKEKERELDKEFCSDENQLQVKLRKLKKDINDLKF |
| | KRERLLDLYLEDERIDKDTFTIRNAKIEKEIGLKEMEIRKASNIEIQMKEKQEVRDAFALLEESKDLH |
| | SVFQKLIKRIEVAQDGAIDIYYRFEE |
| 248 | MWASAGATTYPATVTRQRETQDGVKAGWSRTVALDHTDDADTAQALPLRAAEYVRMSTEHQQY |
| | STENQRDRIREYAARRGLEIVRTYADEGKSGLRIDGRQALQQLIHDVESGTANFQMILVYDVSRWG |
| | RFQDADESAYYEYICKRAGIQVAYCAEQLILNDGSPVSTIVKGVKRAMAGEYSRELSAKVFAGQCR |
| | LIELGFRQGGPAGYGLRRILVDQHGLMKGDLQRGEHKCLQTDRVILMPGPESETRIVNLIYDWFIDE |
| | ALNEYEIAARLNGMRIRTELGREWTRATVREVLTNEKYIGNNVYNRVSFKLKKTRVVNPPEMWIR |
| | KDGAFQSIVPSETFYTAQGIMRARARRYSFEELIERLRNLYRSRGFLSGVVIDETEGMPSASVYAYR |
| | FGSLIRAYQTVGFTPGRDYRYVETNRFLRQLHPEIVAETEKKITDLGGTVSRDPATDLLTVNTEFTA |
| | CIVLSRCQAHDNGRNHWKVRFDTSLLPDITVAVRLNHENAAALDYYLLPRLDFGQLRIHLADHNPI |
| | EFESYRFDTLDYLYGMAERARLRRGA |
| 249 | MLRAAIYIRVSTKLQEEKYSLRAQTTELRRYVEQQRWRLVDEFQDIESGGKLHKKGLNALLDIVEE |
| | GKIDVVVCIDQDRLSRLDTISWEYLKSTLRENKVKIAEPGTIVDLGDEDQEFVSDIKNLIAKREKKAL |
| | VKRMMRGKRQRMREGKGWGQAPYEYYYDKKEEQYKLKKEWAWVIPFIDRLYLEEQLGMRSITD |
| | ELNKISKTPSGIMWNEHLVHTRLTTKAYHGVQEKTFANGEVIAAENIFPKLRTKETWEKIQIERNKR |
| | GNQYKVTSRKRNDLHLLRRTYFVCGECGRKISLAAHGTKEAPRYYLKHGRKLRLADGSVCDVSIN |
| | TVRVEGNIIQAIKDIVTSKELAKQYVNLENEKEEITQLEQNIKNNEQIIQKHTTKNEKLIDLYLDNHL |
| | TKEQLNKKQHEIKNITENLQTQLKRDKAKLETLKSDSWSYDFLSELFESINFFDSDFSPLERAMLMG |
| | NIFPEGIVYRDHIILKANVGGLNFDVKVLVNEDPFPWHYSKSNSKQK |
| 250 | MTVGIYIRVSTEEQAREGFSISAQREKLKAYCVSQDWTDYKFYVDEGKSAKDTNRPYLKLMLDHI |
| | QQGLIDVVLVYRLDRLTRSVKDLYKLLDLFDKNNCIFRSATEVYDTGSATGRLFITLVAAMAQWE |
| | RENLGERVTMGQVEKARQGQYSAPAPFGFKKQDETLVKDKKQGYILMDMIDKVKKGWSIRQIAK |
| | YLDQSYLPIRGYKWHIATILSILHNPALYGALRWKDELNETSHEGYLTKEEFEELQNILYSRQNFRK |
| | RQIESAHIFQMKLVCPQCGNRLGCERSVYFRKKDQKNVESLHYRCQSCALNERPSISVSEKKLEKA |
| | LLLFMKNVKFDLEPVVKEEKNETTEIQNAIVKIERQREKFQKAWASDLMTDEEFTARMSETRKAHE |
| | NFTKRLSEIQRATPLPIDIKKAKKLVNEFKINWAYLNTEEKREFVQSFIEKIEFTKKDQNPHILNVSFY |
| 251 | MKTLKYAVYVRVSTDRDEQVSSVENQIDICRYWLEKNGYEWDPNAVYFDDGISGTAWLERHAMQ |
| | LILEKARRNELDTVVFKSIHRLARDLRDALEIKEILIGHGIRLVTIEENYDSLYEGGNDIKFEMFAMF |
| | AAQLPKTLSVSISAAMQAKARRGEVIGKPGLGYDVIDKRLVINEKEAEVVREIFDLSKKGFGYKKIA |
| | SILNDKGIYTKSGQLWSDTTIAKVLKNQKYKGDLVLNRYKTVKVDGRKKRIYTPKDRLTIIEDHYP |
| | AIVSKELWNEVNNNRVSQKKVKQNMRNEFRGMIFCNHCGGSITVKYSGKCSKKNKKEWVYLKCS |
| | NFLRFNQCVNFNPIYYDEIREIHYRLKQKEKELEIHFNPKIHEKREAKSIEIKKDIKLLKAKKEKLIDL |
| | YVEGLIDKDVFSKRDLNFENEIKEQELELLKLMDQNKRVNEEQQIKKAFSMLDEEKDMHEVFKILI |
| | KKITLSKDKYVEIEYTFSL |
| 252 | MYELKYAVYVRVSTDKDEQVSSIQNQIEICRYWIEKNGFEWDENSIYKDEAVSGTAWLERHAMQL |
| | ILEKVRRKELDTVVFKSIHRLGRDLRDALEIKEILLGHGVRLVTIEEGYDSYYEGKNDLKFEMYAMF |
| | ASQLPKTVSVSVSAALAAKVRRGEYTGGIVPYGYKIVDQKYTINEDEAELVKKMYELYDNGLGYM |
| | KIADAINDMGVPSRTGKLWAYPSIRAIITNAAYKGDYIMQKYAEVKVDGRKKMIINPKEKWVVFE |
| | NHHPAIITRDLWDKVNNPKTDKKTKRRVAINNELRGLACCAHCGTPLALQQRMYKNKEGETRYY |
| | CYLICGRYKRMGARGCVKHSGLQYSDLRLFVLQKLKEKENDLEKVFNLNDTDKHQEKQKKLRKE |
| | KKELEIKRERLLDLYLDGGPIDKETFTKRDKNFEKIIKEKELEILKLDDVKALVVEQQKVKEAFELLE |
| | ESKDLYSTFKKLITRIEVNQDGVINIVYRFEE |
| 253 | MLKRAALYIRVSTDQQAKHGDSLDAQIATLKDYVSTQDNLTIIDTYIDDGISGQKLYRDEFQRLLED |
| | IKKNRIDIILFTKLDRWFRNLRHYLNIQEILDNSGVTWLAVSQPFFNTDTAYGRSFVNQSMSFAELE |
| | AQMASERIKAVFENKIRKGEVVTGSVPFGYKICDKKLIPNENAPIAKDIFKHYSIHNSIRLTVEYLFN |
| | EYDITRSSRTIKHMLRNRKYIGEVSGNKNYCPPIVDKETFEKVQNLLDKNISSIAKRTYIFSGLVVCS |
| | CCGKKMTGRYRKRKYIKKDGTVMYYTKKVYRCNGNTYKRNKCPNKINIPEEILEEYLLYNIKADA |
| | ENFEAKQKKIAVSAPEKNNNSKVLKKIERLKKAYLNEVISLDEYKKDRKELEQMIVQVKPKETIVF |
| | KSNWFKKNIESTYRDFDEEEKRFVWRSVLKNLIVDPHGKITINFLTKN |
| 254 | MKKVAIYTRVSTLEQANEGYSIEGQEQRLKAYCQVHDWDNFEFFVDAGQSASNTKRAGLQNLLN |
| | RLDEFDLVLVYKLDRLTRSVRDLMSLLDTFEEKDVKFRSATEVFDTTSAIGKLFITLVGAMAEWER |
| | STITERTTQGRRIATEKGVYTTVPPFFYDKIEGKLYPNDKKEIVDYIVSRAKAGVSIRGITEELNNSIY |
| | NPPKGKRWDKSVISYVLTSPVSRGHTHIGDVYVENTHEPVISEEDYTIYMQSISQRTHSRGIKHTAIF |
| | RGKLTCPNCAHSLTLNTSKRTKRDGSVDYDERYICDRCRSDKSAENITIQSKEVERAFIDFIQHGEIE |
| | VNVEDTEEQEEQSVIDVDKIKRQRKKYQQAWAMDLMSDEEFQSLIKETDDLLDQHNRQQLRKKE |
| | NKDNHKQIEATHDLILNLWDKMASNDKEDLINASISNIDYNFYRGHGHGKNRTPNSMSVTHIDYK |
| | V |
| 255 | MYELKYAVYVRVSTDRDEQVSSIENQIDICRYWIEKNGYEWDENSIYKDEAVSGTAWLERRAMQL |
| | ILGKARKKELDTVVFKSIHRLGRDLRDALEIKEILLGHGVRLVTIEEGYDSYYEGKNDLKEEMYAM |
| | FASQLPKTLSVSISAALAAKVRRGEYTGGTVPYGYKIVDKKYVINQEEAEIVREMYELYDNGLGYL |
| | RISNALNDVGKYKRSGKLWTYSAVKLIITNPMYKGDYVMGRSTEVKVDGRKKRIQEPREKWVVF |
| | ENHHPAIIERPLWDKINNPKINKKIKRRVAVTNELRGIARCIHCGSPFVLHTYKYKNKEGEELNYGY |
| | LTCGTYKLTGGRGCVKHSGLRYERLRSLVLRKLKEKERDLEKVFKLNDKDKHQEKQKKLRKEKK |
| | ELEIKRERLLDLYLDGGSIDKETFTKRDANFAKNIKEKELEILKLDDVKALIVEQQKVKDAFKLLED |
| | SENLYPVFKKLIAGIDISQNGAVDIRYRFEE |
| 256 | MKSKALVGARVSVYSDSKVSHQAQRESGHRWCQANGAEVLDEFEDLGVSAIKVSTFERPDLGAW |
| | LTPERSHEWDTIVWAKVDRAWRSMRDGLAFMHWAEDNRKRVVFADDGLELDYRNGRKKGDMQ |
| | AVITDMFMLLLSMFAQIEGERFVQRSLSAHGELKTTDRWQAGTPPFGYLTVDRPSGKGKGLAKNP |
| | DQQEILHEMARLFLEGWSYNRLAIWLNDNQIKTNHNLSVTAKAQKTGKSPKKPLSDRPWQDGTVK |
| | KILTSPATQGFKVINMQPDPEKRKHGIDPDYQIASDPVTGEPIRMADPTFDPETWAKIQDKAAERTA |
| | KPRDKTKWSNPMLGVVYCNCGAAFTRISKEDRNYFYFRCGRERGQACKDRTVRGDFLESTIREFFL |
| | QGHLAHRRVTQRKFVPGNDRSEEFEQIQTSIRNMRRNYEKGYYKGEEDEYEAKMDGLVAKRDRIE |
| | SEGVVIRGGYVTEDTGRTWGDLFSESEDWSVIQEAVKDAGIRLMVEGTYPLIVRVDDPNERDGIPY |
| | FSVEMKRAPDLRSNQYRIWAAIQKDPEANDTVIGSRLGVHPVTVGRWRKRMPADGIDPKPEPQYW |
| | IEPFGGTPDPGESHPGDAAA |
| 257 | MITTNKVAIYVRVSTTNQVEEGYSIDEQKDKLSSYCDIKDWNVYKVYTDGGFSGSNTDRPALESLI |
| | KDAKKRKFDTVLVYKLDRLSRSQKDTLHLIEDVFIKNGIEFLSLQENFDTSTPFGKAMIGLLSVFAQ |
| | LEREQIKERMQLGKLGRAKSGKSMMWAKTSYGYDYHKETGTVTINPAQALTIKFIFESYLRGRSIT |
| | KLRDDLNEKYPKHVPWSYRAVRTILDNPVYCGFNQYKGEIYPGNHEPIISKEEYDKTQSELKIRQRT |
| | AAENVNPRPFQAKYILSGIAQCGYCGAPLKIMLGVKRKDGSRLKKYECHQRHPRTLRGVTTYNDN |
| | KKCDSGFYYKDKLEASVLKEISKLQDDADYLDKIFSGDNTETIDRESYKKQIEELSKKLSRLNDLYI |
| | DDRITLEELQSKSAEFISMRGTLETELENDPALRKNKRKADMRKLLNAEKVFSMDYENQKVLVRR |
| | LINKVKVTAEDIVINWKI |
| 258 | MKITNKVAIYVRVSTTSQVEEGYSIDEQKAKLSSYCDIKDWNVYKIYTDGGFSGANTDRPALEGLI |
| | KDAKRKKFDTVLVYKLDRLSRSQKDTLYLIEDIFIKNNIAFLSLQENFDTSTPFGKAMIGLLSVFAQL |
| | EREQIKERMQLGKIGRAKAGKSMMWARTSYGYDYHRGTGTITVNPAQALAVKFIFESYLRGRSIT |
| | KLRDDLNENYPKHVPWSYRAVRAILDNPVYCGFNQFKGEVYPGNHEPIITEEVYNKTKAELKIRQR |
| | TAAENVNPRPFQAKYILSGIGQCGYCGAPLKIILGVKRKDGSRFKKYECHQRHPRTLRGITTYNDNK |
| | KCDSGFYYKDDLETYVLTEISKLQDDAGYLDKIFSEDSAETIDRESYKRQIEELSKKLSRLNDLYIDD |
| | RITLEELQNKSAEFINMRATLETELENDPALRKGKRKADMRELLNAEKVFSMDYESQKVLVRGLIN |
| | KVRVTAEDIVIKWKI |
| 259 | MKVAVYCRVSTLEQANGGHSIEEQERKLKSFCDINDWSIYDTYVDAGYSGAKRDRPELQRLMKDI |
| | NKFDLVLVYKLDRLTRNVRDLLDLLEIFEKNDVSFRSATEVYDTTTAMGRLFVTLVGAMAEWERE |
| | TIRERTQMGKLAALRKGIMLTTPPFYYDRVDNKFVPNKYKDVILWAYDEAMKGQSAKAIARKLN |
| | NSDIPPPNNTQWQGRTITHALRNPFTRGHFDWGGVHIENNHEPIITDEMYEKVKDRLNERVNTKKV |
| | KHTSIFRGKLVCPNCSARLTLNSHKKKSNSGYIFAKQYYCNNCKVTPNLKPVYIKEKEVIKVFYNY |
| | LKRFDLEKYEVTQKQNEPEITIDINKVMEQRKRYHKLYASGLMQEDELFDLIKETDQTIAEYEKQN |
| | ENREVKQYDIEDIKQYKDLLLEMWDISSDEDKEDFIKMAIKNIYFEYIIGTGNTSQKNNSLKITSIEFY |
| 260 | MKVAIYTRVSTLEQREKGHSIDEQERKLRSFCDINDWTVKDVYVDAGFSGAKRDRPELTRLLDDIS |
| | EFDLVLVYKLDRLTRSVRDLLDLLEVFENNNVAFRSATEVYDTTTAIGRLFVTLVGAMAEWERETI |
| | RERSLMGKRAAIKKGMILTAPPFYYDRVNNTYIPNQYKDVVLDVYNKVKKGYSIAHIARLYNNSD |
| | VKPPNDNKEWTTRMLMHALRNPVTRGHYQWGEIYIEDSHEPIITDEMYNTIIDRLDKHTNTKVVAH |
| | TSVFRGKLICPNCGYALTLNSNKRKRKNDTIVYKTYYCNNCKTTKGMKPHHITETETLRVFKDHLS |
| | KIDLKQYETQEKEKQSHVTIDLSKVMEQRKRYHKLYASGMMQENELFELIKETDEMIEEYEKQRK |
| | QVDVKEFDIGKIKEIKDVLLKSWDIFTLEDKADFIQMSIKAINIEYTKLKRGKSSNSMKIKDIEFY |
| 261 | MTVGIYIRVSTEEQAAEGYSISAQRERLKAFCVAQDYADYKFYVDEGISGRNTKRPQFKKLMGDIK |
| | AGHIKVLLVYRLDRLTRSVRDLHNILDKLEKYNCVFRSATEIYDTFTAMGRMFITIVAAIAEWESAN |
| | LGERVSMGQIEKARQGEWAAQAPYGFYKDENHKLHIDDQQIKAIKIMIQKVREGLSFRQLSIYMDS |
| | TEHKPKRGYKWHIRTLMDLMQNPVLYGAMYFKGTVYENTHQGIMDKKEFDQLQKLITSRQNYKT |
| | RNVTSHFVYQMKIVCPDCGSRCTSERSVWKRKTDGSTQVRNSYRCQVCALNHRDITPFNVREFTV |
| | DEALMEFMDNFPLTPDDKPQEKTDDESLELKQELKRIENQRGKYQRAWATDLVTDEEFKIRMDES |
| | RSRMEEIQVMLKEMKCEVHEEVDIERYKEIAQNFNINFENLSPKERREFVQMFIESVEIEILERTKAK |
| | GFRNQRIRVSSVHFY |
| 262 | MSDSLIRRLRCAVYTRKSTDEGLDQEYNSIDAQRDAGHAYIASQRAEGWIPVADDYDDPAYSGGN |
| | MDRPAIKRLMADIEAGKIDIVVIYKIDRLTRSLTDFARMVDVFERHGVSFVSVTQQFNTTTSMGRL |
| | MLNILLSFAQFEREVTGERIRDKIAASKRKGMWMGGIPPIGYDVVNRRLVLNDGEAKLVRHIFRRF |
| | VEIGSSTLLVKELRLDGVTSKAWTTQDGKVRKGRPIDKALIYKLLHNRTYLGELRHRDQWYPGEH |
| | PSIIDSELWDRVHAILSTNGRARASATRAKVAKVHCLLRGMVFGSDGRALSPISTVKKDGRRYRYY |
| | VPQREKKEHAGASGLPTLPAAELEAAVLDQLRAILRSPGLIGDMLPRAIALDPSLDEAMVTVAMTR |
| | LDAIWDQLFPAEQTRIVNLLVEKVIVSPDDLEVRLRANGIERLVLELRPATDGGAEEVMA |
| 263 | MYRAAEYVRMSTEHQQYSTENQADKIREYAERRGIQIVRTYADEGKSGLSIDGRQALQRLIRDVES |
| | GDADFEMILVYDVSRWGRFQDADESAYYEYICRRAGIQVTYCAEQFENDGSPVSTIVKGVKRAMA |
| | GEYSRELSAKVFAGQCRLIELGYRQGGPAGYGLRRVLVDQTGTFKSELARGEHKSLQTDRVILMPG |
| | PEQEVATVNQIYRWFVDDGLTESEIASRLNAGCVPTDLGREWTRATVRQVLSNEKYIGNNIYNRISF |
| | KLKKHRVVNEPEMWIRKDGAFEAIVPPDIFYTAQGILRARSHRYSNEELLEKLRNLFRQRGVLSGLI |
| | IDEAEGMPSTAAYIHRFGSLLRAYEAVGFTPDRDYRFLEVNQFLRRLHPEIISQTERMILDLGGSVQR |
| | DLATDLLDVNREFTVSMVLARCLVLDNGRRRWKVRFDASLLPDITVAVRLDESNENPLDYYLLPR |
| | LDFGQPGISLADHNRIEYESYRFENLDYLYGMAERYRLRRAA |
| 264 | MKAAIYIRVSTQEQIENYSIQAQTEKLTALCRSKDWDVYDIFIDGGYSGSNMNRPALNEMLSKLHEI |
| | DAVVVYRLDRLSRSQRDTITLIEEYFLKNNVEFVSLSETLDTSSPFGRAMIGILSVFAQLERETIRDR |
| | MVMGKIKRIEAGLPLTTAKGRTFGYDVIDTKLYINEEEAKQLQMIYDIFEEEKSITTLQKRLKKLGF |
| | KVKSYSSYNNWLTNDLYCGYVSYADKVHTKGVHEPIISEEQFYRVQEIFSRMGKNPNMNRDSASL |
| | LNNLVVCGKCGLGYVHRRKDTVSRGKKYHYRYYSCKTYKHTHELEKCGNKIWRADKLEELIIDR |
| | VNNYSFASRNVDKEDELDNLNEKLKTEHTKKKRLFDLYISGSYEVSELDAMMADIDAQINYYNSQI |
| | EANEELKRDKKVQESLAELAAVDFDSLEFREKQIYLKSIINKIYIDGEQVTIEWI |
| 265 | MTKAAIYIRVSTQDQVENYSIEVQRERIRAFCKAKGWDIYDEYIDGGYSGSNLERPGIKKLITDLKNI |
| | DAVVVLKLDRLSRSQRDTLELIEEHFLKNKVDFVSITETLDTSTPFGKAMIGILSVFAQLERETIAER |
| | MRMGHIKRAENGLRGNGGDYDPAGYTRKDGHLVIKKDEAVHIKRAFDLYEQYYSITKVQEVLKE |
| | EGYPIWRFRRYRDILSNTLYIGRVTFSGKEYEGQHEPIISSEQFKRVQALLKRHKGHNAHKAKQSLL |
| | SGLITCSCCGENYVSYSTGKSKAAESKRYYYYICRAKRFPAEYEERCMNKTWSRKKLEEVIISELKN |
| | LTEEKKQTNKKEKKINYEKLIKDIDKKMERLLDLFMNTTNISKGLLEQQMEKLNLEKEKLLLKQQR |
| | SEEESISHEVTLTAIDDAFEILDFKEKQVIINNFIEQIYINQNNVKIIWRF |
| 266 | MKTAIYLRKSRADLEAEARGEGETLAKHRSTLLKIAKEMNLNVLAVREEIVSGESLVKRPEMLALL |
| | EEIEDNKYDVVLCMDMDRLGRGGMKEQGIILETFKRSNTKIMTPRKTYDLNDEWDEEYSEFEAFM |
| | ARKELKIITRRMQRGRIASVEAGNYLGTHAPFGYDIHRLNKRERTLTINSEEASVVRMIFDWYANED |
| | MGASAIRNKLNDLGYKSKLGNEWNPYSILDILKNNVYIGKVTWQKRKEVKRPDAVKRSCARQDK |
| | SDWIIADGKHEPIIPESLFEQVQEKLNSRYHIPYNTNGIKNPLAGIIKCAKCGYSMVQRYPKNRKETM |
| | DCKHRGCENKSSYTELIEKRLLEALKEWYINYKSDFEKYKQDDKLKETQVIQMNEVALRKLEKEL |
| | VDVQKQKNNLHDLLERGVYTVDMFLERSNVVSDRINEITLTMEKLQKEIKTEIKKEKVKKDTIPQV |
| | EHVLDLYFKTDDPKKKNSLLKSVLEKAVYKKEKWQRLDDFELVLYPKLPQDGDI |
| 267 | MVIVAYAVYVRVSSDKDEQVSSVENQIDICRYWLENNGFEWDENAVYFDDGISGTAWLERHAIQL |
| | VLEKARKKEIDTVVFKSIHRLARDLKDALEIKEILLGHGVRLITIEEGYDSHYEGKNDMKFEMYAM |
| | FASQLPKTLSVSITAALAAKVRRGGYTGGFVPYGYEIIDGKYAINEEEAALVKEIFELYAQGFGYIKI |
| | ANTINDKGARTRKGAPWTFSTLSKMIKNPAYKGTYIMQKYGTVKVNGRKKKVINPKEKWVIFEDH |
| | HPAIISHELWEKVNNKDPNKFKKKRRVSTTNELRGITVCAHCGTAMSKRNSINVSKNGTETEYSYM |
| | ICNWSRITARRECVRHVPIHYKDLRALVLSKLKEKEKELDKEFGSDENQLQVKLRKLKKDINDLKF |
| | KRERLLDLYLEDERIDKDTFTIRNAKIEKEIGLKEMEIRKASNIEIQMKEKQEVRDAFALLEESKDLH |
| | SVFQKLIKRIEVAQDGAIDIYYRFEE |
| 268 | MASENDKNHKVRVAQYLRMSTDHQQYSLHNQSEYIKDYAEKNNMEIAYTYDDAGKSGVSIIGRH |
| | SLQQLLSDVEQKKIDIQAVLFYDVSRFGRFQNSDEAAYYSFLFERNGVDLIYCSEPIPTKDFPLESSVI |
| | LNIKRSSAAYHSRNLSEKVFIGQVNLIKLGYHQGGMAGYGLRRLLVDENGIAKEILGFRKRKSIQTD |
| | RVILIPGPKNEIKIVNSIYDLFIDDNMPEFIIAERLNEQNIPAENGTLWTRAKIHQILTNEKYIGNNIYN |
| | KTSSKLKSRLVKNPKNEWVRCDKAYKPIISKKKYNKAQEIIQLRSVHLTNEELLEKLKQKLETNGK |
| | LSGFIIDEDDTGPSSSVYRTRFGGLLRAYTLIGYKPEHDYSYIQINEALRSFYSGIIEDFKGEIIKSNCYI |
| | DEYKYAPMLYINDEFLISVLITKCTHMKSGKLRWKVRFDNSQKADITIVIRMDSQNITPLDFYIIPKIE |
| | NEYSKMCMTETNNIRLDLYRFDNLDKLLQIITRMKVRELYAA |
| 269 | MNKKVAIYVRVSTLEQAESGYSIGEQIDKLKKFADIKEWQVYDVYEDGGFSGSNTTRPALERMISD |
| | AKRKLFDTVLVYKLDRLSRSQKDTLFLIEDVFKVNNIDFVSLNENFDTSTAFGTAMIGILSVFAQLE |
| | REQIRERMKLGLVGRAKSGKAMGWHMTPFGYTYDKKSGNFIIDEVAAGVVKMIFDDYLSGISITK |
| | LRDKLNSEGHIGKDRNWSYRTLRQTLDNPTYTGVVKYDGKTFPGNHEPILTSETFQSVQYELDIRQ |
| | KQAYLKNNNSRPFQSKYILSGIAKCGYCGAPLVSILGNKRKDGTRLLKYQCANRIIRKAHPVTTYN |
| | DNKQCDSGFYMMQNIEAYVINSISELQTNPQKIQEIIKLDNDQPVIDTLYLESELAKISSRLKKLSDL |
| | YMSDLMTLDDLKNRTKELKQTRKNIEAKIFSEENKHGHTKSDIFRSRIDGNNITELDYDKQSMLAK |
| | SLIRKVSVTNETIEISWDF |
| 270 | MRCAIYARVSTEEQAVEGYSISAQKKKLKAYCDAQDWDVVGYYVDEGISAKNTNRPELKRMIEHI |
| | EKGLIDCVLVHRLDRLTRSVLDLYTLLDVELEYDCKFKSATEVYDTTTAIGRLFITIIAALAQWERE |
| | NIGERVRVGQQEKVRQGKYTSPRKPYGYNADHKEGILTIIEEEAKVVRSIYNDYLKGHSATRISKRL |
| | NATKTAGRDYWNEKAVMYILENPLYIGTLRWRKETEHYFEVPNSVPAIIEEEMFNSVQILRESRQES |
| | HPRSQYGSYIFSGILKCPRCGRSLVGNYVVSKKKDGTKIKYKHYYCKGRKLNVCTMGNMSERKLE |
| | QAIIPHILSFYIDATDEDVKLENSNTENEIEQIKSELKIIEKRRKKWQYAWANDHLKDEEFTEFMQEE |
| | NENEKVLTEELYKLKPAENKKLQNEELKNILKDIKLNWANLNDEEKKIFMQIILKKLVIERSDKLHA |
| | YKLEIVEMEFN |
| 271 | MRTVITYLRFSSAIQGAEGADSTRRQNDLFKQWLKKNGDAQIVASFSDEGLSGYKGKHLTGQFGD |
| | MLARIEAGEFPEGTILLVESIDRIGRLEHLETEALMNRILGNGIEIHTLQDGLIYTKDALADDLGISIIQ |
| | RVKAYIAHQKSKQKSFRVSQKWGQRAKLALAGEQRLTKMVPGWIDPETFKLNEHAETVRLIFKLL |
| | LDGESLHNIARHLQSNGIKSFSRRKDANGFSVHSVRTILRSETTIGTLPASQRNDRPAIPNYYEGVVD |
| | IPTFNKAQEILDKNRKAVHLQVTTH |
| 272 | MAVGIYIRVSTQEQASEGHSIESQKKKLASYCEIQGWDDYRFYIEEGISGKNTNRPKLKLLMEHIEK |
| | GKINILLVYRLDRLTRSVIDLHKLLNFLQEHGCAFKSATETYDTTTANGRMSMGIVSLLAQWETEN |
| | MSERIKLNLEHKVLVEGERVGAIPYGFDLSDDEKLVKNEKSTILLDMVERVENGWSVNRIVNYLNL |
| | TNNDRNWSPNGVLRLLRNPVLYGATRWNDKIAENTHEGIISKERFNRLQQILSDRSIHHRRDVKGT |
| | YIFQGVLRCPVCDQTLSVNRFIKKRKDGTEYYGALYRCQPCAKQNKYNFAIGEARFLKALNEYMS |
| | TVEFQTEEDEVSSEKNEREILESQLQQIARKREKYQKAWASDLMSDDEFEKLMVETRETYNECKQQ |
| | LENCKDPVKIDTKYLKEIVFMFHQTFNSLESEKQKEFISKFIRTIRYTIKEQQPIRPDKSKTGKGKQKV |
| | IITEVEFYQ |
| 273 | MKKITKIDGNKGTSIIKPKLRVAAYCRVSTDNDEQLVSLQAQKSHYETYIKANPEWEYVGLYYDEG |
| | ISGTKKENRSELLRMLSDCENKKIDLIITKSISRFARNTTDCLEMVRKLLDLGIYIYFEKENINTQSME |
| | SELMLSILSGLAESESISISENNKWAIQRRFQNGTFKISYPPYGYDNIDGQMVVNPEQAEIVKYIFAEV |
| | LSGKGTQKIADDLNQKGIPSKRGGRWTATTIRGILKNEKYTGDVILQKTYTDSRFNKRTNYGEKNR |
| | YLIENHHEAIISHEDFEAVDAVLNQRAKEKGIEKRNCKYLNRYAFSSKIICSECGSTFKRRIHSSGRK |
| | YIAWCCSKHISNITECSMQFIRDEDIKTAFVTMMNKLIFGQKFILRPLLNGLRSQNNAESFRRIEELET |
| | KIESNMEQSQMLTGLMAKGYLEPALFNKEKNSLETERERFLAEKYQLTRSVNGDFAKVEEVDRLL |
| | KFATKSKMLNAYEDEVFEDYVEKIIVFSREKVGFELKCGITLKERLVN |
| 274 | MAVSRNVTVIPAIKRIGNNKNSESKPKIRVAAYCRVSTDSEEQASSYEIQIEHYTNYIKRNKEWELA |
| | GIFADDGITGTNTKKRDEFNRMIEECMAGNIDMIITKSISRFARNTLDCLKYIRQLKDKNIAVFEEKE |
| | NINTMDSKGEVLLTIMASLAQQESQSLSQNVRLGIQYRYQQGEVQVNHKRFLGYTKDENKQLVIDP |
| | EGAEVVKRIFREYLEGSSLLQIARGLEADGILTAAGKSKWRPETLKKILQNEKYIGDALLQKTYTIDF |
| | LSKKRVKNNGIVPQYYVENSHEPIIPRELFMQVQEEMVRRVNLRGGKGGKKRVYSSKYALSSIVYC |
| | GQCGDIYRRVHWNNRGYKSIVWRCVSRLEEKGSECTAPTINEETLQAAVVKAINELLTKKEPFLST |
| | LQKNIATVLNEENDNTTDDIDRKLEELQQQLLIQAKSKNDYEDVADEIYRLRELKQNALVENAERE |
| | GKRQRIAEMTDFLNEQSCELEEYDEQLVRRLIEKVAVLEDKLVIEFKSGIEIEEEM |
| 275 | MKPRQWAAENTEEKPKLKVAAYCRVSTEMEEQASSYEAQVQHYTDYIQRNPDWELAGIFADEGIS |
| | GTGTKKRDGFNRMIEECKKGDVEYIITKSISRFARNTVDCLQYIRQLKDLHIAVFFEKENINTMDAK |
| | GEVLLTIMASLAQQESQSLSQNTKMGVQYRFQQGQLRINHNHFLGYTKDEDGNLVIEPKEAEVIKR |
| | IFREYLEGSSLQEIANGLMSDGILTGGKRKLWRGEGVRLILRNEKYMGDALLQKTYTTDFLTKKRV |
| | KNDGSYAQQYYVENSHPAIIPRDIFMQVQQELDRRKSMKNKHSQCFSGKYALSGITVCGDCGNAY |
| | RRVHWKNRGTVWRCKSRVDKREHNCSGRTIYEKDLHEAIIKAINETLVDREDFLQQLSENINSVLT |
| | DGLTGRLEELDSKLKELESEIISMAFGGQGYDELATKILALRNERDMVGREIAADANMQQRIDEMG |
| | DFVKNHDTISEYSEVLVRRLIEKVTIFEKDIVVDFKSGVNIAIEI |
| 276 | MKAAIYIRVSTQEQIENYSIQAQTEKLTALCRSKDWDVYDIFIDGGYSGSNMNRPALNEMLSKLHEI |
| | DAVVVYRLDRLSRSQRDTITLIEEYFLKNNVEFVSLSETLDTSSPFGRAMIGILSVFAQLERETIRDR |
| | MVMGKIKRIEAGLPLTTAKGRTFGYDVIDTKLYINEEEAKQLRLIYDIFEEEQSITFLQKRLKKLGFK |
| | VRTYNRYNNWLTNDLYCGYVSYKDKVHVKGIHEPIISEEQFYRVQEIFARMGKNPNMNRDSASLL |
| | NNLVVCGKCGLGFVHRRKDTVSRGKKYHYRYYSCKTYKHTHELEKCGNKIWRADKLEELIIDRV |
| | NNYSFASRNVDKEDELDYLNEKLKIEHAKKKRLFDLYINGSYEVSELDSMMNDIDAQINYYESQIE |
| | ANEELKKNKKIQENLADLATVDFDSLEFREKQLYLKSLINKIYIDDEQVTIEWL |
| 277 | MKAAIYIRVSTQEQVENYSIQAQTEKLTALCRSKDWDVYDTFIDGGYSGSNMNRPALNEMLSKLH |
| | EIDAVVVYRLDRLSRSQRDTITLIEEYFLKNNVEFVSLSETLDTSSPFGRAMIGILSVFAQLERETIRD |
| | RMVMGKIKRIEAGLPLTTAKGRTFGYDVIDTKLYINEEEAKQLQMIYDIFEEEKSITTLQKRLKKIGF |
| | KVKSYSSYNNWLTNDLYCGYVSYADKVHTKGVHEPIISEEQFYRVQEIFSRMGKNPNMNRDSASL |
| | LNNLVVCGKCGLGFVHRRKDTVSRGKKYHYRYYSCKTYKHTHELEKCGNKIWRADKLEELIIDRV |
| | NNYSFASRNVDKEDELDSLNEKLKIEHTKKKRLFDLYISGSYEVSELDAMMSDIDAQINYYEAQIEA |
| | NEELKKNKKIQENLADLATVDFNSLEFREKQLYLKSLINKIYIDDEQVTIEWL |
| 278 | MKVPVWCYARISTLKQIDGFGIQRQINTINQFLQCVELDHRLPFTLDVDNVTQMVAEGKSAFREKN |
| | WNEKTKLGQYRKLVMDGVVKESVLITESIDRLTRLDPYKAVEILSGLINRGTTILEVDTGMTYSRYI |
| | PESLSVLTMQINRANGESKRKSIMMQKSHANRYGKVSKVRPRWFDVVEIDDIKQYRPNETAKAIQR |
| | MYNDYINGIGAAHIVRTYGNTDNGKAWTLVTVLRALSDKRVADDARYPPIIDKDLYDSVQALKAA |
| | TNKKGNTHQKNMLNIFSGMSRCPVCNQSIIVKRNSHGNLFTVCLGKRTNKTCSARSISYFALERPLL |
| | TAIRGLDFSEVYKHEDKNVLTLRDQWIQNERDIAAFRERLNKASRHEKFAILDELEIMNREQEELTI |
| | RLKSVDVPKDIQLTFDDDKLDLDTNYRIELNNRIKKLIQHINIVREDVSKSSYTIYCTIKYWTDVISHL |
| | VIIDVNIKRTGTGGTNTLTTTLRSVSSLNMDGTVSGNPDSDAWEYWKSFLDNLK |
| 279 | MKPRQWAAENTEEKPKLKVAAYCRVSTEMEEQASSYEAQVQHYTDYIQRNPDWELAGIFADEGIS |
| | GTGTKKRDGFNRMIEACQKGDVEYIITKSISRFARNTVDCLQYIRQLKDLHIAVFFEKENINTMDAK |
| | GEVLLTIMASLAQQESQSLSQNTKMGVQYRFQQGQLRINHNHFLGYTKDEDGNLVIEPKEAEVIKR |
| | IFREYLEGSSLQEIANGLMSDGILTGGKRKLWRGEGVRLILRNEKYMGDALLQKTYTTDFLTKKRV |
| | KNDGSYAQQYYVENSHPAIIPRDIFMQVQQELDRRKSMKNKHSQCFSGKYALSGITVCGDCGNAY |
| | RRVHWKNRGTVWRCKSRVDKREHNCSGRTIYEKDLHEAIIKAINETVVDREDFLQQLSENINSVLT |
| | DGLTGRLEELDSKLKELESEIISMAIGGQGYDELVSQIFSLRDERDAVAKQIAANTNLQQRVDEMVV |
| | FVKEHDVINEYSEVLVRRLIEKVTIFEKNIVVDFKSGVRVTVEI |
| 280 | MKAAIYIRVSTQEQIENYSIQAQTEKLTALCRSKDWDVYDIFIDGGYSGSNMNRPALNEMLSKLHEI |
| | DAVVVYRLDRLSRSQRDTITLIEEYFLKNNVEFVSLSETLDTSSPFGRAMIGILSVFAQLERETIRDR |
| | MVMGKIKRIEAGLPLTTAKGRTFGYDVIDTKLYINEEEAKQLRLIYDIFEEEQSITFLQKRLKKLGFK |
| | VRTYNRYNNWLTNDLYCGYVSYKDKVHVKGIHEPIISEEQFYRVQEIFARMGKNPNMNRDSASLL |
| | NNLVVCGKCGLGFVHRRKDTISRGKKYHYRYYSCKTYKHTHELEKCGNKIWRADKLEELIIDRVN |
| | NYSFASRNVDKEDELDYLNEKLKIEHAKKKRLFDLYINGSYEVSELDSMMNDIDAQINYYESQIEA |
| | NEELKKNKKIQENLADLATVDFDSLEFREKQLYLKSLINKIYIDDEQVTIEWL |
| 281 | MKAAIYIRVSTQEQIENYSIQAQTEKLTALCRSKDWDVYDIFIDGGYSGSNMNRPALNEMLSKLHEI |
| | DAVVVYRLDRLSRSQRDTITLIEEYFLKNNVEFVSLSETLDTSSPFGRAMIGILSVFAQLERETIRDR |
| | MVMGKIKRIEAGLPLTTAKGRTFGYDVIDTKLYINEEEAKQLRLIYDIFEEEQSITFLQKRLKKLGFK |
| | VRTYNRYNNWLTNDLYCGYVSYKDKVHVKGIHEPIISEEQFYRVQEIFSHMGKNPNMNKESASLL |
| | NNLVVCSKCGLGFVHRRKDTVSRGKKYHYRYYSCKTYKHTHELEKCGNKIWRADKLEELIIDRVN |
| | NYSFASRNIDKEDELDSLNEKLKIEHTKKKRLFDLYISGSYEVSELDAMMNDIDAQINYYEAQIEAN |
| | EELKKNKKIQENLADLATVDFNSLEFREKQLYLKSLINKIYIDDEQVTIEWL |
| 282 | MKAAIYIRVSTQEQVENYSIQAQTEKLTALCRSKDWDVYDTFIDGGYSGSNMNRPALNEMLSKLH |
| | EIDAVVVYRLDRLSRSQKDTITLIEEYFLKNNVEFVSLSETLDTSSPFGRAMIGILSVFAQLERETIRD |
| | RMVMGKIKRIEAGLPLTTAKGRTFGYDVIDTKLYINEEEAKQLRLIYDIFEEEQSITFLQKRLKKLGF |
| | KVRTYNRYNNWLTNDLYCGYVSYKDKVHVKGIHEPIISEEQFYRVQEIFSRMGKNPNMNKESASL |
| | LNNLVVCSKCGLGFVHRRKDTVSRGKKYHYRYYSCKTYKHTHELEKCGNKIWRADKLEELIIDRV |
| | NNYSFASRNIDKEDELDSLNEKLKIEHAKKKRLFDLYINGSYEVSELDYMMNDIDAQINYYEAQIEA |
| | NEELKKNKKIQENLADLATVDFNSLEFREKQLYLKSLINKIYIDGEQVTIEWL |
| 283 | MRCAIYRRVSTDEQAEKGFSLENQKLRLESFATSQGWEVVEDYVDDGFSGKDTNRPALQRMFSNV |
| | DKFDVILVYKLDRFTRSVKDLNEMLETIKENEIAFKSATESIDTTTATGRMILNMMGTTAQWERETI |
| | SERIKDVFGKLRENGIFSTGHPPYGYRCSGNKSIEIVEEQAEIVRYIYELSKTMGLFKISVELNRKGIK |
| | TRRNNKFGQSAVKRILHNPFYCGYMEVNNKWVPIKNEGYIPIISEEEFKTTQKILTKRNKAQTRSRS |
| | VSYYPFSGIVLCPECQRAMRGDRAKYGDYYYRYYRCVYGRENINCTNRKRIRAEQVDKAFAEYIS |
| | GSFENTTIKLDSKDIKSDIEYELKHLDSKIERLSDIYIEGDITKSKYNEKMNSLLNEKEKLKKDLTSCK |
| | ENVDAEFVRDQINKLESIWHLIDDKTKSESIRSIFDTIKIKQDKNKVTIMDHTLL |
| 284 | MKYAVYVRVSTDKDEQVSSIQNQIEICRYWIEKNGFEWDENSIYKDEAVSGTAWLERRAMQLILG |
| | KARKKELDTVVFKSIHRLGRDLRDALEIKEILLGHGVRLVTIEEGYDSYYEGKNDLKFEMYAMFAS |
| | QLPKTLSVSISAALAAKVRRGEYTGGTVPYGYKIVDKKYVINQEEAEIVREMYELYDNGLGYLRIS |
| | NALNDVGKYKRSGKLWTYSAVKLIITNPMYKGDYVMGRSTEVKVDGRKKRIQEPREKWVVFENH |
| | HPAIIERPLWDKINNPKINKKIKRRVAVTNELRGIARCIHCGSPFVLHTYKYKNKEGEELNYGYLTC |
| | GTYKLTGGRGCVKHSGLRYERLRSLVLRKLKEKERDLEKVFKLNDKDKHQEKQKKLRKEKKELEI |
| | KRERLLDLYLDGGSIDKETFTKRDANFAKNIKEKELEILKLDDVKALIVEQQKVKDAFKLLEDSENL |
| | YPVFKKLIARIDISQNGAVDIRYRFEE |
| 285 | MKTAIYLRKSRADLEAEARGEGETLAKHRTTLLKIAKEKNLNVLAVREEIVSGESLVKRPEMLALL |
| | EEIEDNKYDVVLCMDMDRLGRGGMKEQGIILETFKRSNTKIMTPRKTYDLNDEWDEEYSEFEAFM |
| | ARKELKIITRRMQRGRIASVEAGNYIGTHAPYGYDILRLNKRERTLTINLEEASVVRMIFEWYANED |
| | MGASVITNKLNQLGYKSKLGNDWNPYSVLDMLKNNIYIGKVTWQKRKEVKRPDATKRSCTRQDK |
| | SEWIIADGKHDPIISESLFEKAQEKLNTRYHVPYNTNGLKNPLAGVIRCGKCGYSMVQRYPKNRKK |
| | TMDCKHRGCENKSSYTELIEKRLLEALKEWYINYKADFNKNNQENLSKEKQTIKINQAALRKLEKE |
| | LLDVQKQKNNLHDLLERGVYTVDMFLERSNVVSDRINEITETMENLRKEIKTEITKEKVKKDTIPQV |
| | EHVLDLYFKTDDPQKKNSLLKSVLEKAVYTKEKWQRLDDFKLVLYPKLPQDGDK |
| 286 | MKVALYVRVSTLEQAEEGYSINEQKDKLKKYCEIKDWTIVKEYIDPGRSGSNINRPSMQQLIKDAD |
| | TGLYDAVLVYKLDRLSRSQKDTLYLIEDVFQKNNIHFISLSENFDTSTAFGKAMIGILSVFAQLEREQ |
| | IKERMSMGRVGRAKSGKIMEFNNPAFGYEIDGDNYKVDPLRAEIVKRIYKMYLSGTSINKIKETLNS |
| | EGHIGNKKNWSDTRIRYILSNPTYLGKIRYDGKTYDGKFSPIIDEETFNKTQNELKERQTATYKRFN |
| | MKLRPFQSKYMLSGLLRCGYCGATLFVNSYVYNGKRKLRYNCPSTYKSKQKTRTYKIMDPNCPFK |
| | LVYAKDLEPAVINEIKNLALNPQSIQKPIKKKPDIDVETIQKELAKIRKQQQRLIDLYVISDDVNIDNI |
| | SKKSADLKLQEETLKKQLAPLEEPDNDDKIVAFNEILAQIKDIDSLDYDKQKFIVKKLIKKIDVWND |
| | NKIKIHWNI |
| 287 | MREQKDKLKKYCEIKDWTIVKEYIDPGRSGSNINRPSMQQLIKDADTGLYDAVLVYKLDRLSRSQ |
| | KDTLYLIEDVFQKNNIHFISLSENFDTSTAFGKAMIGILSVFAQLEREQIKERMSMGRVGRAKSGKI |
| | MEFNNPAFGYEVDGDNYKVDPLRAEIVKRIYKMYLSGTSINKIKETLNSEGHIGNKKNWSDTRIRYI |
| | LSNPTYLGKIRYDGKTYDGKFSPIIDEETFNKTQNELKERQTATYKRFNMKLRPFQSKYMLSGLLRC |
| | GYCGATLFVNSYVYNGKRKLRYNCPSTYKSKQKTRTYKIMDPNCPFKLVYAKDLEPAVINEIKNL |
| | ALNPQSIQKPVKKTPDIDVEAIQKELAKVRKQQQRLIDLYVISDDVNIDNISKKSADLKLQEETLKK |
| | QLAPLEEPDNDDKIVAFNEILDQIKDIDSLDYDKQKFIVKKLIKKIDVWNDNKIKIHWNI |
| 288 | MKTAIYLRKSRADLEAEARGEGETLAKHRSTLLKIAKEMNLNVLAVREEIVSGESLVKRPEMLALL |
| | EEIEDNKYDVVLCMDMDRLGRGGMKEQGIILETFKRSNTKIMTPRKTYDLNDEWDEEYSEFEAFM |
| | ARKELKIITRRMQRGRIASVEAGNYLGTHAPFGYDIHRLNKRERTLTINSEEASVVRMIFDWYANED |
| | MGASAIRSKLNDLGYKSKLGNEWNPYSILDILKNNVYIGKVTWQKRKEVKRPDAVKRSCARQDKS |
| | DWIIADGKHEPIIPESLFEQVQEKLNSRYHIPYNTNGIKNPLAGIIKCSKCGYSMVQRYPKNRKETMD |
| | CKHRGCENKSSYTELIEKRLLEALKEWYINYKADEEKHKQDDKLKETQVIQMNEAALRKLEKELV |
| | DVQKQKNNLHDLLERGVYTVDMFLERSNVVSDRITEITSTMENLKKEIKTEIKKEKVKKDTIPQVE |
| | HVLDLYFKTDDPKKKNNLLKSVLEKAVYKKEKWQRLDDFELVLYPKLPQDGDI |
| 289 | MKTAIYLRKSRADLEAEARGEGETLAKHRTTLLKIAKEKNLNVLAVREEIVSGESLVKRPEMLALL |
| | EEIEDNKYDIVLCMDMDRLGRGGMKEQGIILETFKRSNTKIMTPRKTYDLNDEWDEEYSEFEAFMA |
| | RKELKIITRRMQRGRIASVEAGNYLGTHAPYGYDIHRLNKRERTLTINSEEASVVRMIFEWYANED |
| | MGANAIMRKLNELGYKSKLGNDWSPYSILDILKNNVYIGKVTWQKRKEVKRPDSVKRSCARQDK |
| | SEWIIADGKHEPILSESLFEKVQEKLNSRYHVPYNTNGLKNPLAGIIKCGKCGYSMVQRYPKNRKQ |
| | TMDCKHRGCENKSSYTELIEKRLLEALKEWYINYKADEEKNKQDESTKETQIIQMNEATLRKLEKE |
| | LVDVQKQKNNLHDLLERGVYTVDMFLERSNVVSNRINEITETMENLRKEIKTEITKEKVKKDTIPQ |
| | VEHVLDLYFKTDDPQKKNSLLKSVLEKAVYTKEKWQRLDDFKLLLYPKLPQDGDK |
| 290 | MKTAIYLRKSRADLEAEARGEGETLAKHRSTLLKIAKEKNLNVLTVREEIVSGESLVKRPEMLALL |
| | EEIEDNKYDVVLCMDMDRLGRGGMKEQGIILETFKRSNTKIMTPRKTYDLNDEWDEEYSEFEAFM |
| | ARKELKIITRRMQRGRIASVEAGNYLGTHAPYGYDIHRLNKRERTLTINLEEASVVRMIFEWYAHE |
| | DMGANAIMRKLNELGYKSKLGNDWNPYSILDMLKNNVYIGKVTWQKRKEVKRPDATKRSCTRQ |
| | DKSEWIIADGKHDPIIPESLFEKAQEKLNTRYHVPYNTNGLKNPLAGIVRCGKCGYSMVQRYPKNR |
| | KHTMDCKHRGCENKSSYTELIEKRLLEALKEWYINYKADFEKNKQDESTKETQIIQMNEAALRKLE |
| | KELVDVQKQKNNLHDLLERGVYTVDMFLERSNVVSNRINEITETMENLRKEIKTEITKEKVKKDTIP |
| | QVEHVLDLYFKTDDPKKKNSLLKSVLEKAVYTKEKWQRLDDFKLVLYPKLPQDDDK |
| 291 | MRCAIYRRVSTDEQAEKGFSLENQKLRLESFATSQGWEVVEDYVDDGFSGKDTNRPALQRMFSNV |
| | DKFDVILVYKLDRFTRSVKDLNEMLETIKKNEIAFKSATESIDTTTATGRMILNMMGTTAQWERETI |
| | SERIKDVFGKLRENGIFSTGHPPYGYRCSGNKSIEIVEEQAEMVRYIYELSKTMGLFKISVELNGKGI |
| | KTRRNNKFGQSAVKRILHNPFYCGYMEVDNKWVPIKNEGYTPIISEEEFKTTQKILTKRTKAQTRSR |
| | SVSYYPFSGIVLCPECQRAMRGDRAKYGDYYYRYYRCVYGRENINCTNRKRIRAEQVDKAFAEYI |
| | SRSFENTTIKLDSRDIKSDIEYELKHLDSKIERLSDIYIEGDITKSKYNEKMNSLLNEKEKLKKDLTSC |
| | KEHVDAEFVRNQINKLESIWNLIDDKTKSESIRSIFDTIKIKQDKNTVTIMDHTLL |
| 292 | MKCVIYRRVSTDEQAEKGFSLENQKLRLESFATSQGWEVVGDYVDDGYSGKNMERPALKRMFND |
| | VDKFDVILVYKLDRFTRSVRDLNDMMETIKEHDIAFKSATEFIDTTTATGRMILNMMGSTAQWERE |
| | TISERVTDTMYKRAESGLWNGGRIPFGYKQVGRNLIINEEESTIVKEMFDLSLSYGFLGVSLKLNER |
| | GYKTKTGCKWNRTGVRHILMNPIYCGYVRYGNQNNDTKDVVMAKIKQDGFKEIVSKERFDECQRI |
| | FESRKKNAPKPRHGEFNYFSGIFVCPNCGRKLYGVTYQQKDNIYKYYKCSKQSQKFCEGFHISLEV |
| | LDAAFLKELNLILDDVKISPLKKIDPVSIKKEIDEISKKKERIKNLYIDEIISRDEMKEKIEELNIKEKDL |
| | YNTLSEEEQQISESIIRETFENLSQNWKQIPDEIKMYMIRSVFESIEFKVIKKARGRWHKAVIEITDYK |
| | MR |
| 293 | MKTAIYLRKSRADLEAEARGEGETLAKHRSTLLKIAKEMNLNVLAVREEIVSGESLVKRPEMLALL |
| | EEIEDNKYDVVLCMDMDRLGRGGMKEQGIILETFKRSNTKIMTPRKTYDLNDEWDEEYSEFEAFM |
| | ARKELKIITRRMQRGRVASVEAGNYLGTHAPYGYDIHRLNKRERTLTINSEEASVVRMIFDWYANE |
| | DMGASAIRNKLNDLGYKSKLGNDWNPYSILDILKNNVYIGKVTWQKRKEVKRPDAVKRSCARQD |
| | KSDWIIADGKHEPIIPESLFEQVQEKLNSRYHVPYNTNGIKNPLAGIIKCSKCGYSMVQRYPKNRKE |
| | TMDCKHRGCENKSSYTELIEKRLLEALKEWYINYKADEEKHKQDDKLKETQVIQMNEAALRKLEK |
| | ELVDVQKQKNNLHDLLERGVYTVDMFLERSNVVSDRITEITSTMGNLKKEIKTEIKKEKVKKDTIP |
| | QVEHVLDLYFKTDDPKKKNSLLKSVLEKAVYKKEKWQRLDDFELVLYPKLPQDGDI |
| 294 | MRCAIYRRVSTDEQVEKGYSLENQKIRLESFATSQGWEVVGDYVDDGYSGKDTNRPAFKKMFKD |
| | VEKFDVILVYKLDRFTRSVKDLNEMLETIREHDIAFKSATESIDTTTATGRMILNMMGSTAQWERET |
| | ISERIKDVIDKQREQGIWNGGITPYGYRKTDGILSVQEDEAETVRFIFKNVIAYGYIKISKLLNEKGIP |
| | TAKGKGLWIAQSVRNIVKNHYYYGKMNYCNNGREEFAEIKIEGYKPIISKDEFNLAQKATKKRAST |
| | PTRSRSDEIYPFSGIAVCPQCGAKLGGTIVKVRGSKYKYYRCSKRNQNRCNSPAFRDTSLDEAFLKY |
| | LKMPYPDLKVKRVDNLNSSDVIKKEIKKLNSKKDKVKELYIEEFLTKKEFKDKIFTIDNKILELESEL |
| | ENNNQAISDDLYRETLLFMEQTWNGLDDETKAFSLRGLFDSLVFKKTGRSKVEFIDHTLL |
| 295 | MKYAVYVRVSTDKDEQVSSIQNQIEICRYWIEKNGFEWDENSIYKDEAVSGTAWLERRAMQLILG |
| | KARKKELDTVVFKSIHRLGRDLRDALEIKEILLGHGVRLVTIEEGYDSYYEGKNDLKFEMYAMFAS |
| | QLPKTLSVSISAALAAKVRRGEYTGGTVPYGYKIVDKKYVINQEEAEIVREMYELYDNGLGYLRIS |
| | NALNDVGKYKRSGKLWTYSAVKLIITNPMYKGDYVMGRSTEVKVDGRKKRIQEPREKWVVFENH |
| | HPAIIERPLWDKINNPKINKKIKRRVAVTNELRGIARCIHCGSPFVLHTYKYKNKEGEELNYGYLTC |
| | GTYKLTGGRGCVKHSGLRYERLRSLVLRKLKEKERDLEKVFKLNDKDKHQEKQKKLRKEKKELEI |
| | KRERLLDLYLDGGSIDKETFTKRDGNFVKNIQEKELEILKLDDVKALIVEQQKVKDAFKLLEDAEN |
| | LYPVFKKLIARIDISQNGAVDIRYRFEE |
| 296 | MSVAIYVRVSTLEQAESGYSIGEQTEKLKSYCKIKDWDIAKIYTDPGYSGSSLDRPAIQALISDCKAG |
| | FFDAVLVYKLDRLSRSQKDTLYLIEDVFNANNIHFMSLSENFDTSTPFGKAMIGLLSVFAQLEREQI |
| | KERMQMGKLGRAKAGKISAWANVPFGYVKNKDTYDIDPLRSEIVKRIYKDYLSGKSITRIMQDLN |
| | QEGHIGKDTLWSYRTVRQVLDNETYTGRTKYRGQVFNGLHKSIITKDDWDEVQRLLKIRQLDQAK |
| | KSNNPRPFQARYMLSGLLKCVYCGSTLAIAKSHTKDGPLWRYVCPSHNVRKYRNGGSAAHYRIAP |
| | INCKFKFKYMSELESAVIHEVKKIALDPSAVISSQDDQPEIDKAAIKAQLKKIKRQQDKLVDLYLLG |
| | DDLDVDQLHKRADQLKEQAAALRAQLKPSDKNIESFKKTVKDAKEIEKLDYEHQKSIVRMLIDHV |
| | NVGNDGINIFWKM |
| 297 | MLKRAALYIRVSTDQQAKHGDSLDAQIATLKDYVSTQDNLTIIDTYIDDGISGQKLYRDEFQRLLED |
| | IKKNRIDIILFTKLDRWFRNLRHYLNIQEILDNSGVTWLAVSQPFFNTDTAYGRSFVNQSMSFAELE |
| | AQMASERIKAVFENKIRKGEVVTGSVPFGYKICDKKLIPNENAPIAKDIFKHYSIHNSIRLTVEYLFN |
| | EYDITRSSRTIKHMLRNRKYIGEVSGNKNYCPPIVDKETFEKVQNLLDKNISSIAKRTYIFSGLVVCS |
| | CCGKKMTGRYRKRKYIKKDGTVMYYTKKVYRCNGNTYKRNKCPNKINIPEEILEEYLLNNIKADA |
| | ENFEAKQKKIAVSAPEKNNNSKILKKIERLKKAYLNEVISLDEYKKDRKELEQMIVQVKPKETIVFK |
| | SNWFNKNIESTYRDFDEEEKRFVWRSVLKNLLVDPHGKITINFLTKN |
| 298 | MKAAIYIRVSTQEQIENYSIQAQTEKLTALCRSKDWDVYDIFIDGGYSGSNMNRPALNEMLSKLHEI |
| | DAVVVYRLDRLSRSQRDTITLIEEYFLKNNVEFVSLSETLDTSSPFGRAMIGILSVFAQLERETIRDR |
| | MVMGKIKRIEAGLPLTTAKGRTFGYDVIDTKLYINEEEAKQLQMIYDIFEEEKSITTLQKRLKKLGF |
| | KVKSYSSYNNWLTNDLYCGYVSYADKVHTKGVHEPIISEEQFYRVQEIFSRMGKNPNMNRDSASL |
| | LNNLVVCGKCGLGYVHRRKDTVSRGKKYHYRYYSCKTYKHTHELEKCGNKIWRADKLEELIIDR |
| | VNNYSFASRNVDKEDELDSLNEKLKTEHTKKKRLFDLYISGSYEVSELDAMMSDIDAQINYYEAQI |
| | EANEELKKNKQIQENLADLATVDFDSLEFREKQLYLKSLINKIYIDGEQVTIEWL |
| 299 | MKGESKLDKKAAIYIRVSTQEQATEGYSIQAQTDRLTKYVEAKDFILYKKYIDAGYSASKLERPAM |
| | QELIQDVQSKKVDIVIVYKLDRLSRSQKDTMYLIEDIFRPNDVELISMQESFDTSTAFGSATVGMLS |
| | VFAQLERKSISERMITGRVERAKKGFYHTGGQDRPPAGYQFNSDNQLIINEYEAAAIKDLFRLYND |
| | GLGKSSISEYLKKNYPGKNKWLPSSIDRMLKNSLYIGKVKFSGAEYDGIHEPIIDEVTFYKTQKEIAR |
| | RKQTNTKRYNYVALLGGLCECGICGAKMANRRAVGRKGKVYRYYRCYSKKGSPKHMMKTDGCS |
| | SKAQQQFIIDEAVINNLKNIDVEAELKRRSAPQTNTSLISSQIESIDKQINKLIDLFQVDSMPLDVISEK |
| | IDKLNKEKQSMEKLLERKNKLDKTELQHRFDILKSFDWDNSSIESKRVVIEMLVQKVIIHDNSIEIIL |
| | VE |
| 300 | MKAAIYIRVSTQEQIENYSIQAQTEKLTALCRSKDWDVYDIFIDGGYSGSNMNRPALNEMLSKLHEI |
| | DAVVVYRLDRLSRSQRDTITLIEEYFLKNNVEFVSLSETLDTSSPFGRAMIGILSVFAQLERETIRDR |
| | MVMGKIKRIEAGLPLTTAKGRTFGYDVIDTKLYINEEEAKQLRLIYDIFEEEQSITFLQKRLKKLGFK |
| | VRTYNRYNNWLTNDLYCGYVSYKDKVHVKGIHEPIISEEQFYRVQEIFSRMGKNPNMNRDSASLL |
| | NNLVVCGKCGLGFVHRRKDTVSRGKKYHYRYYSCKTYKHTHELEKCGNKIWRADKLEELIIDRV |
| | NNYSFASRNIDKEDELDSLNEKLKIEHTKKKRLFDLYISGSYEVSELDAMMSDIDAQINYYEAQIEA |
| | NEELKKNKKIQENLADLATVDFNSLEFREKQLYLKSLINKIYIDDEQVTIEWL |
| 301 | MTALLQVVEPELWVGYIRVSTWNEEKISPEIQEDALRAWAIRTGRRLADPLVVDLDATGRNFNRKI |
| | QGAIERVERREAKGIAVWRFSRFGRNRVGNNVNLARLESVGGQLESATEPVDARTALGELQREMIF |
| | AFGNYESNRAGEQWRETHEVRLKNQLPATGRARFGYVWHPRRVPDPTAPTGWRLQDERYTLHQE |
| | YASVAEEMFERKLAKPVPQGFNTIGHWLNEELRVTTLRGGLWHTSTISRYMDSGFAAGYLLSHDR |
| | ECTCGYGKDPKQSKCANGRMLYLPGAQPKIIEDDVWEEYKAHRKLTKNKPPRTRKATYTLTGLLR |
| | HGYCRHHISHASATQKGVQVPGHWLVCSRNKNVSKIACPQGINASRKEVEDQVFDWLGRVAPKV |
| | DALPVIPGQTTAPKEDPRVATKRERAWINTELKKVEAALDRLVEDNAMDPDKYPADAFDRVRNKF |
| | VAKKGALTKQLAALGEAEATPQREDFQPLIDSLLAEWESFTNIERNAMLETAIRRVVVHDIRSEDSR |
| | FIKIRTEVHPVWEPDPWEPKKICRGPFGTRAGWLSAALFERPAEFDIEHQAQSEAAPAA |
| 302 | MVDAGQRVLGRIRLSRLTDESTSKERQQEVIEQWSQMNGHTIVGWAEDMDVSRSVDPFDTPALGE |
| | WLTKPEKVEQWDIVATWKLDRLATGSIYLNKMMHWCFKHGKVIVSVTENFDLSTWVGRMIANVI |
| | AGVAEGELEAIKERTKASRKKLVESGRWPGGKAPYGYRPVKLDDGGWALEINPEQEAVILRAAAE |
| | IIDGAAFESVAKRLREEGVPTPRGGTWAPSVLKKMLMNKSLLGHSTYRGETVRDAHGNPVLISDPI |
| | FQLDEWNRLQAAAEARTVAPRRTRQTSPLLGIVKCWECEENLAYKYYKTRHCYYHCRHSGEHTQ |
| | MMRSEDVEKWLEEEFLLKVGDELAQERVYVPAENHRQALDEATKAVDELTALLATVSSDTMRTR |
| | LLGQLGSLDAKISELEKMPSREAGWELREMDYTYRDAWERADTEGKRQLLLRSEITAQIKLTDRSA |
| | NGAGGAGMFHTKLNIPEDILERLAASRD |
| 303 | MEVAAYLRVSTDEQAESGHSLLEQQERLKAYAKVMGWDKPTFYIDDGYSAGSLKRPQLQKLIRDI |
| | ENRKVSILMTTKLDRLSRNLLDLLQIIKFMETHDCNYVSATESFDTSTAAGRMVLHLLGVFAEFER |
| | GRTSERVKDNMTSLARNTNIALSGPCFGFDIIDKQYVLNKKEAKYGLKMVEMTEAGHGTRSIAQW |
| | LNSMNVKTKRGKQWDSTTVRRLLRTETICGTRVINKRKKVNGKTVMRPKEEWIIKENNHEGFISPE |
| | RFKNLQNILDSRKINKQHENETYLLTGILKCGYCGGTMKGSSARVSRGDKKYEYYRYICSSYVKGS |
| | GCKHHAAHREDIENAVIIQIESITNSSNKELQLKVVTSNEDEDVFELKRALESLNKQMMRQIEAYGK |
| | GLIEEEDLERSNKHVKEQRQLLRNQLDSLEQFNTPKALKEKAKILLPDIKSLDRKKAKTTIAQLIDSL |
| | VLTDGELDIVWRI |
| 304 | MKPRQWAAENTEEKPKLKVAAYCRVSTEMEEQASSYEAQVQHYTDYIQRNPDWELAGIFADEGIS |
| | GTGTKKRDGFNRMIEECKKGDVEYIITKSISRFARNTVDCLQYIRQLKDLHIAVFFEKENINTMDAK |
| | GEVLLTIMASLAQQESQSLSQNTKMGVQYRFQQGQLRINHNHFLGYTKDEDGNLVIEPKEAEVIKR |
| | IFREYLEGSSLQEIANGLMSDGILTGGKRKLWRGEGVRLILRNEKYMGDALLQKTYTTDFLTKKRV |
| | KNDGSYAQQYYVENSHPAIIPRDIFMQVQQELDRRKSMKNKHSQCFSGKYALSGITVCGDCGNAY |
| | RRVHWKNRGTVWRCKSRVDKREHNCSGRTIYEKDLHEAIIKAINETLVDREYFLQQLSENINSVLT |
| | DGLTGRLEELDSKLKELESEIISMAIGGQGYDELATKILALRNERDMVEREIAADANMQQRIDEMG |
| | DFVKNHDTISEYSEVLVRRLIEKVTIFEKDIVVDFKSGVNIAIEI |
| 305 | MKAAIYIRVSTQEQVENYSIQAQTEKLTALCRSKDWDVYDIFIDGGYSGSNMNRPALNEMLSKLHE |
| | IDAVVVYRLDRLSRSQRDTITLIEEYFLKNNVEFVSLSETLDTSSPFGRAMIGILSVFAQLERETIRDR |
| | MVMGKIKRVESGLPLTTAKGRTFGYDVVDTKLYVNKEEAQHLQLIYDIFEEEKSITFLQKRLKKLG |
| | FKVKSYSSYNKWLMNDLYIGYVSYGDKVHVKGVHEPIISEEQFYRVQEVFSRMGKNPNMNKESSS |
| | LLNNLIVCEKCGLSFVHRVKDTVSRGKKYHYRYYSCKTYKHTHELEKCGNKTWRADKLEEIIIDRV |
| | KNYSFATRNVDKEDELDSINAKLKVEHLKKKRLFDLYINGSYEVAELDKMMADIDAQINYYNSQIE |
| | ANEELKRNKKVQESLAELATVDFDSLEFREKQIYLKSIINKIYIDGEQVTIEWI |
| 306 | MKYAVYVRVSTDKDEQVSSIQNQIEICRYWIEKNGFEWDENSIYKDEAVSGTAWLERRAMQLILG |
| | KARKKELDTVVFKSIHRLGRDLRDALEIKEILLGHGVRLVTIEEGYDSYYEGKNDLKFEMYAMFAS |
| | QLPKTLSVSISAALAAKVRRGEYTGGTVPYGYKIVDKKYVINQEEAEIVREMYELYDNGLGYLRIS |
| | NALNDVGKYKRSGKLWTYSAVKLIITNPMYKGDYVMGRSTEVKVDGRKKRIQEPREKWVVFENH |
| | HPAIIERPLWDKINNPKINKKIKRRVAVTNELRGIARCIHCGSPFVLHTYKYKNKEGEELNYGYLTC |
| | GTYKLTGGRGCVKHSGLRYERLRSLVLRKLKEKERDLEKVFKLNDKDKHQEKQKKLRKEKKELEI |
| | KRERLLDLYLDGGSIDKETFTKRDANFAKNIKEKELEILKLDDVKALIVEQQKVKDAFKLLEDSENL |
| | YPVFKKLIAGIDISQNGAVDIRYRFEE |
| 307 | MKAAIYIRVSTQEQIENYSIQAQTEKLTALCRSKDWDVYDIFIDGGYSGSNMNRPALNEMLSKLHEI |
| | DAVVVYRLDRLSRSQRDTITLIEEYFLKNNVEFVSLSETLDTSSPFGRAMIGILSVFAQLERETIRDR |
| | MVMGKIKRIEAGLPITTAKGRTFGYDVIDTKLYINEEEAKQLRLIYDIFEEEQSITFLQKRLKKLGFK |
| | VRTYNRYNNWLTNDLYCGYVSYKDKVHVKGIHEPIISEEQFYRVQEIFSRMGKNPNMNRDSASLL |
| | NNLVVCGKCGLGFVHRRKDTVSRGKKYHYRYYSCKTYKHTHELEKCGNKIWRADKLEELIIDRV |
| | NNYSFASRNVDKEDELDSLNEKLKIEHTKKKRLFDLYISGSYEVSELDAMMSDIDAQINYYEAQIEA |
| | NEELKKNKKIQENLADLATVDFNSLEFREKQLYLKSLINKIYIDDEQVTIEWL |
| 308 | MTGKQVTVIPMKPKKWVADNTEEKPKLKVAAYCRVSTEMEEQASSYEAQVQHYTDYIQKNPDW |
| | ELAGIFADEGISGTDTKKRAEFNRMIDACKNGEIEYIITKSISRFARNTVDCLQYIRKLKELKIAVFFE |
| | KENINTMDAKGEVLLTIMASLAQQESQSLSQNTKMGVQYRFQQGQLRINHNHFLGYTKDEDGNLV |
| | VEPKEAEIIKRIFREYLEGSSLQDIAKGLMDDGILTGGKRKLWRAEGVRLILRNEKYMGDALLQKTF |
| | TVDFLTKKRVKNDGSYAQQYYVENSHPAIIPKDIFTQAQQELDRRKSMKNKNSQCFSGKYALTGIT |
| | ICGDCGNVYRRVHWKNRGTVWRCKSRVDKREHNCNGRTIYEKDLHQGILQAINETLIDRDVFLQQ |
| | LTDNINSVLTDGLTEQLAGLDEQLKDLESEIISVAIGGQGYDELASQIFSLRDERDAVAKQIAANTNL |
| | QQRVDEMVVFVKEHDVINEYSEVLVRRLIEKVTIFEKNIVVDFKSGVRVTVEI |
| 309 | MKLLVTYIRWSTKEQDSGDSLRRQTILIDAFYSKHKNDYYLLPAHRYVDKGKSGFHQQHKAQGSD |
| | FRRMFENVMSGAIPEGSLIVVENFDRFSRADIDTAIDDVRQILRKGVSILTLGDGELYDKSALTDPVK |
| | LIKHIIIAERAHQESLVKQKRIAQVWNHKTQLARELKKPMGKQAPGWLELSEDGSHYIVDEDKASL |
| | VNIIYDKRLSGMSMFAICKWLNEQGYPTINQRKVRISKTKKPDGNWSALSVKHILTSRSVLGYLPA |
| | KISTEDRKTVLREEIEGFYPQIVTDSKFYAVQRLLEETGKGKTSSGEHWLYVNILKGLIRCRCGLVM |
| | TPTGIRKPVYQGTYRCNGNKESRCSYGTVSRKLLDTQLCSRLFSKLSQLHDEATDTAKLDELQRRL |
| | NTVDSELEKLTETLIQLPNITQIQEALRVKQEEKDELIVQLSREKGKRPISDVL |
| 310 | MVLVYKLDRLTRSVRDLLDLLEIFDQNNVAFRSATEVYDTTNAMGRLFVTLVGAMAEWERATITE |
| | RTLYGKEGALEGGKFLGHVPFYYDLVDNKLIPNENRKYVDYIIKRLKENISATQIGKELSNMKNTP |
| | VKFNKTMVIQILHSPTAHGHTKYGKFFKENTHEPVITQEDYNTAIKILSTRRHTYKQNHASIFRGKIA |
| | CPNNCGRFLHLNVNKIKRADGSYYLRQYYKCDKCSREKKPSTIIRYDMMQEAFMKYLNNLSFDTIE |
| | PPENNDDEEEFEIDIAKVMRQREKYQKAWAMDLMTDDEFKARMKETDKLLEEASEKEVENNELEF |
| | EQVIKIQKLLQKSWKNLSEDKKEDLIAATIDKIQIEIIRGNKTVNSPNEVKIKDVSFLL |
| 311 | MRTNEHNFHNIEEEIKHVAVYLRLSRGEDESELDNHKTRLLNRCELNNWSYELYKEIGSGSTIDDRP |
| | VMQKLLTDVEKNLYDAVLVVDLDRLSRGNGTDNDRILYSMKVSETLIVVESPYQVLDANNESDEE |
| | IILFKGFFARFEFKQINKRMREGKKLAQSRGQWINSVTPYGYKVNKTTKKLTPSEEEAKVVIMIKDF |
| | FFEGKSTSDIAWELNKRKIKPRRATEWRSSSIANILQNEVYIGNIVYNKSVGNKKPSKSKTRVITPYR |
| | RLPEEEWRRVYNAHQPLYSREEFDRIKQYFESNVKSHKGSEVRTYALTGLCKTPDGKTLRVTQGK |
| | KGTDDDLYLFPKKNKHGDSSIYKGISYNVVYETLKEVIVQVKDYLDSVLDQNENKDLVEELKEEL |
| | MKKEDELETIQKAKNRIVQGFLIGLYDEQGSIELKVEKEKEIDEKEKEIEAIKMKIDNAKTVNNSIKK |
| | TKIERLLSDVQSAESEKEINRFYKTLIKEIIVDRTDENEAKIKVNFL |
| 312 | MTLPDIPSTFHGSAHAGEPWIGYIRVSTWKEEKISPELQRTAIEQWAARTGRRIVDWIVDLDESGRH |
| | FKRKIMGGIERIERREVRGIAVWRYSRFGRNRTGNAANLARVEAVGGLLESATEPVDASTAIGRFA |
| | RGMYMEFAAFESDRAGEQWKETHEHRLAAKLPATGRPRFGYVWHRRRVPDPTAPSGIRLQDERY |
| | ALHPDHASVVEELYERKIEDHDGFNSLVHWLNEDLAIPTMRGKAWGVSSVSRYLDSGFAAGFLRT |
| | HDKTCPCGYSSGTRSGCPDNRFIYLPGAQPRIIDPDQWEAYKEHRKTIKATPPRARKATYTLTGLLR |
| | HGYCRFHMSAASYTSHGKQLRGHLLVCSRHKYANRVDCPKGISVKREYVEGEVLTWLKREAAPG |
| | VGVGSSATVHRAEPVEDPRARVQRERGRLQAELSKIEGALDRLVADNAMNPEKYPADSFARVRDQ |
| | FAGKKGSIMKALAELGEVETTPTREEYVPLMLDLIEAWPHMDAIERNAVLRQLVRRIVCHDIRAEG |
| | SRWIETRVEVHPVFEPDPWAPIVGEVVARKDEPAEVDDRADAVTLF |
| 313 | MNKVAIYVRVSTSVQAEEGYSIDEQIDKLKSYCQIKDWTVYDVYKDGGFSGGNINRPALEKMIIDA |
| | KKKRFDTVLVYKLDRLSRSQKDTLYLIEDVFSKNDISFLSLQENFDTSTPFGKAMVGLLSVFAQLER |
| | EQIKERMQLGMIGRAKSGKPMMFTNVSFGYTYSPKTQQLTINQAEAVIVKQIFNEFLGGMSPLRLM |
| | AYLNENNILRNGKEWNYQGIQRILRNPVYIGKIKYNNVIYPGLHEPIIDEESYYKAQKLLDARQDEM |
| | RVKGKNRQFKAKYMLSGTAKCGYCGAPLRIKIGNKRLDGTRLKVYQCCNRYPRKYAVVTYNDN |
| | KKCNSGNYQKEDLEQYVIAEIRKLQLKPEKIDKLFNKVSKIDTVQINKQIASIDKKINRLNDLYLND |
| | MIDIDKLKADAEKFKEQKRVLEKELDKDLKIQEQEKNKEDFKKTIGFKDVTKLDYEEQSFIVKSLID |
| | KILVKKGLIKILWKI |
| 314 | MQRVAIYMRVSTDQQAKHGDSLREQQETLDEYIKRNKNLKVVDKYIDGGISGQKLNRDEFQRLLD |
| | DVKNDQIDLILFTKLDRWFRNLRHYLNTQEILEKHNVSWNAVSQQYYDTTTAYGRTFIAQVMSFA |
| | ELEAQMTSERIKSVFSNKIQQGEVVSGKVPLGYKIENKRLVPTSDKDIVIDLFDYYVRVGSLRKTTT |
| | YLEEKHGIVRDYQSVRKLLTNEKYIGKLRNNTNYCEPIIDKDIFETVQLRLSQNVKTSGSHDYIFRGL |
| | VRCADCDGSMSCSTLKSKYIKKTDGEVSYYIRSCYRCTRRRNNPTRCKNKKTYYERALERYLLDNI |
| | QTNIAMHVRTLKKEVTKKDSVKRKKDALFVKIERLKKAYLNEIIELDEYKRDRELLENEIASLKEPK |
| | INKNIAPLKKVLSDDFFEKYEKASINQKNELWRSIIESIEVSVDGNITINFLP |
| 315 | MLKRAALYIRVSTDQQAKHGDSLDAQIATLKDYVSTQDNLTIIDTYIDDGISGQKLYRDEFQRLLED |
| | IKKNRIDIILFTKLDRWFRNLRHYLNIQEILDNSGVTWLAVSQPFFNTDTAYGRSFVNQSMSFAELE |
| | AQMASERIKAVFENKIRKGEVVTGSVPFGYKICDKKLIPNENAPIAKDIFKHHSIHNSIRLTVEYLFN |
| | EYDITRSSRTIKHMLRNRKYIGEVSGNKNYCPPIVDKETFEKVQNLLDKNISSIAKRTYIFSGLVVCS |
| | CCGKKMTGRYRKRKYIKKDGTVMYYTKKVYRCNGNTYKRNKCPNKINIAEEILEEYLLNNIKADA |
| | ENFEAKQKKIAVSAPEKNNNSKILKKIERLKKAYLNEVISLDEYKKDRKELEQMMIQVKPKETIVFK |
| | SNWFNKNIESTYRDFDEEEKRFVWRSVLKNLIVDPHSKITINFLTKN |
| 316 | MKTAIYLRKSRADLEAEARGEGETLAKHRTTLLKIAKEMNLNVLSVREEIVSGESLVKRPEMLALL |
| | EEIEDNKYDVVLCMDMDRLGRGGMKEQGIILETFKRSNTKIMTPRKTYDLNDEWDEEYSEFEAFM |
| | ARKELKIITRRMQRGRVASVEAGNYLGTHAPFGYDIHRLNKRERTLTINPEEASVVRMIFDWYANE |
| | DMGASAIRNKLNDLGYKSKLGNEWNPYSILDILKNNVYIGKVTWQKRKEVKRPDAVKRSCARQD |
| | KSDWIIADGKHEPIIPESLIALQAQEKLNSRYHVPYNTNGIKNPLAGIIKCSKCGYSMVQRYPKNRKE |
| | TMDCKHRGCENKSSYTELIEKRLLEALKEWYINYKADIALAHKQGDKLKETQVIQMNEAALRKLEK |
| | ELVDVQKQKNNLHDLLERGVYTVDMFLERSQVISDRINEITSTMENLKKEIKTEIKKEKVKKDTIPQ |
| | VEHVLDLYFKTDDPKKKNSLLKSILEKAVYKKEKWQRLDDFELVLYPKLPQDGDI |
| 317 | MKGESKLDKKAAIYIRVSTQEQATEGYSIQAQTDRLTKYVEAKDFILYKKYIDAGYSASKLERPAM |
| | QELIQDVKSKKVDVVIVYKLDRLSRSQKDTMYLIEDIFRPNDVELISMQESFDTSTAFGSATVGMLS |
| | VFAQLERKSISERMITGRVERAKKGFYHTGGQDRPPAGYQFNSDNQLIINEYEAAAIKDLFRLYND |
| | GLGKSSISEYLKKNYPGKNKWLPSSIDRMLKNSLYIGKVKFSGVEYDGIHEPIIDEVTFYKTQKEIAR |
| | RKQSNTKRYNYVALLGGLCECGICGAKMANRRAVGRKGKVYRYYRCYSKKGSPKHMMKTDGCS |
| | SKAQQQFIIDEAVINNLKNIDVEAELKRRSAPQTNTSLISSQIESIDKQINKLIDLFQVDSMPLDVISEK |
| | IDKLNKEKQSMEKLLERKNRLDKTELQHRFDILKSFDWDNSSIESKRAVIEMLVQKVIIHDNSIEIILV |
| | E |
| 318 | MIAAIYSRKSKFTEKGESVENQIEMCKDYLKRNFTSIEDIKIYEDEGFSGKDTNRPEFKKMMEDAKN |
| | KKFSILICYRLDRISRNVADFSNTIEELQKYSIDFISLKEQFDTSSPMGRAMMNIAAVFAQLERETIAE |
| | RIKDNMLELAKTGRWLGGTAPLGYKSEVIEYWNEDGKNKKMYKLATAENEIDIVKLIYKLYFKKR |
| | GFSSVATHLCKNKYKGKNGGEFSRETVRQIVINPVYCTADNKIFKWFKSKGATVYGTPDGIHGLM |
| | VYNKREGGKKEKPISEWVIAIGKHAGIISSDIWLKCQNIIEENKSKISPRSGTGEKFLLSGMIICGECGS |
| | GMSSWSHFNKKTNFMERYYRCNLRNRASNRCSNKMLNAYKAEEYISDYLKELDIDTLKEKYLKN |
| | KKSMATYDSSKQELAKLKNVLEDNNKLIKGLIRKLALLDDDIEIVTMLKNEIENIKKENNEINNNIN |
| | KIKSSLEESDRENKFLKELEQSLLNFKKFYDFVDTSEKRALIKSLISTLVWYSKDEILELNPIGIKPNIS |
| | QGVIKRRT |
| 319 | MKKAIAYMRFSSPGQMSGDSLNRQRRLIAEWLKVNSDYYLDTITYEDLGLSAFKGKHAQSGAFSE |
| | FLDAIEHGYILPGTTLLVESLDRLSREKVGEAIERLKLILNHGIDVITLCDNTVYNIDSLNDPYSLIKAI |
| | LIAQRANEESEIKSSRVKLSWKKKRQDALESGTIMTASCPRWLSLDDKRTAFIPDPDRVKTIELIFKL |
| | RMERRSLNAIAKYLNDHAVKNFSGKESAWGPSVIEKLLANKALIGICVPSYRARGKGISEIAGYYPR |
| | VISDDLFYAVQEIRLAPFGISNSSKNPMLINLLRTVMKCEACGNTMIVHAVSGSLHGYYVCPMRRL |
| | HRCGRPSIKRDLVDYNIINELLFNCSKIQPVENKKDANETLELKIIELHMKINNLIAALSVAPEVTAIA |
| | EKIRVLDKELRRASVSLKTLKCKAVSSLGDFHAIDLTSKNGRELCRTLAYKTFEKII1NTDNKTCDIY |
| | FMNGIVFKHYPLMKTISAQQAISTLKYMVDGEVYF |
| 320 | MRKVAIYSRVSTINQAEEGYSIQGQIEALTKYCEAMEWKIYKNYSDAGFSGGKLERPAITELIEDGK |
| | NNKFDTILVYKLDRLSRNVKDTLYLVKDVFTANNIHFVSLKENIDTSSAMGNLFLTLLSAIAEFERE |
| | QIKERMQFGVMNRAKSGKTTAWKTPPYGYRYNKDEKTLSVNELEAANVRQMFNMIISGCSIMSIT |
| | NYARDNFVGNTWTHVKVKRILENETYKGLVKYREQTFSGDHQAIIDEKTYNKAQIALAHRTDTKT |
| | NTRPFQGKYMLSHIAKCGYCGAPLKVCTGRAKNDGTRRQTYVCVNKTESLARRSVNNYNNQKIC |
| | NTGRYEKKHIEKYVIDVLYKLQHDKEYLKKIKKDDNIIDITPLKKEIEIIDKKINRLNDLYINDLIDLP |
| | KLKKDIEELNHLKDDYNKAIKLNYLDKKNEDSLGMLMDNIDIRKSSYDVQSRIVKQLIDRVEVTMD |
| | NIDIIFKF |
| 321 | MLRPICYERVSSIQQIEGGGGLDDQRSALEGYLDKNAGLFENDRLFIQDRGVSAFKNSNISSESQLGI |
| | FLQDVQNRKYGEGDALIVMSLDRISRRSSWAEDTIRFIVNSGIEVHDISASTVLRKDDPHSKLIMELI |
| | QMRSHNESLMKSVRAKAAWDRKIIEAVQNGTVISNKMPMWLKNVDNRYQVIQEKADLIIRCFEW |
| | YRDGFSTGEIVKRIADPKWQMVTVSRLVRDRRLLGEHKCYNDEVIHNVYPKVIDDDLFLTANRMM |
| | DRVMLEKNKPAEDLLLESDVVQEIFQLYESGLGSGAIVKRLPKGWSTVNVLRVLRDKNVVTQKIID |
| | NLTFERVNQKLSMNGVANRIRKDITIAQDDYITNLFPKILKCGYCGGNVAIHYNHVRTKYVICRNRE |
| | ERKICDAKSIQYIRIEKNILKCVKNVDFQKLMIESTGSETSVLDGLHEELSSLRREENSYSDKINERKL |
| | AGKRVGIHLNDGLTEVQDRIEEIEKEIINAQTVREIPKFDFDMDEVLDPMNIELRAKVRKQLRLVLK |
| | AVKYWMFDKRIFIQLEYFNDVLSHMLVIDNKRGGGDVIYEMSIEERKGERIYTVHENGHAVFIASV |
| | TIGTDIWSLALSRTRTIDSIGNYLSLLAREGFEIFVNEDQIDWF |
| 322 | MYGYNLKPCLTRRNTLKRMEQITPPPISASPLVKVAAYARISMETERTPLSLSTQVSYYQQLIHDTP |
| | GWTFAGVFADSGISGTTTHRPQFQEMLALAREGAIDLILTKSISRFARNTVDLLETVRELKDLGVEV |
| | RFEKENISSTSADGELMLTLLASFAQAESEQISQNVKWRIWKGFEEGKANGFHLYGYTDSADGTDV |
| | QIIEEEAAVVRWIFAQYMKETSCEKMAAQLIADGRVPHLADNKLPGEWVRHILKNPHYTGDLLLG |
| | RWSTPEGRPGRAVRNTGQLPQYLVENAIPAIIDRDTFVAVQTEIARRRELGARANWSIETVALTSKI |
| | KCVSCNCSFVRNVRNPKTQNSISTEHWICTERKKGRKTGCGTCEISDTALKGFIAQVLGIEAFDEDV |
| | FNERIDHIDVQGKDHYTFQYTDGTSSSHTWRPNLKKSSWTPARKAAWGELVRARWAEAKRLGLD |
| | NPRQAPTPPEALAKYRAVAKAEAERLRAERGER |
| 323 | MKVAIYTRVSSAEQANEGYSIHEQKRKLISFCEVNDWNRYEVFSDPGVSGGSMERPSLQKLFDRLE |
| | EFDLVLVYKLDRLTRNVRDLLEMLEVFEKNNIAFKSATEVFDTTSAIGKLFITIVGAMAEWERETIR |
| | ERSLMGSHAAVRSGKYIRAQPFCYDLIDDKLKPNQHAKYIRFMVDKLMIGKSASEVVRQLESKKK |
| | PPGITKWNRKTVLNWIKNPVMRGHTKFGDLLIENTHEPIISEDEYLKLIDIIEKRTYKTKSKHKAIFR |
| | GVLECPQCQSKLHLSRSIKKYDSGKTLEVRRYSCDKCHRDNSVKNISFNESEIEREFINTLLKKGTD |
| | NFKISVPKKKSYDIEDNKVKINEQRANYTRSWSLGYIKDEEYFMLMDETENLLKDIEEKAKSHTDE |
| | KLNEEQIRTVKNLLIKGFKIATLEDKEDLITSSVDVIKFEFIPKKFNKNKPLNTVKINEIQFRF |
| 324 | MVIVAYAVYVRVSSDKDEQVSSVENQIDICRYWLENNGFEWDENAVYFDDGISGTAWLERHAIQL |
| | VLEKARKKEIDTVVFKSIHRLARDLKDALEIKEILLGHGVRLITIEEGYDSHYEGKNDMKFEMYAM |
| | FASQLPKTLSVSITAALAAKVRRGGYTGGFVPYGYEIIDGKYAINEEEAALVREIFELYAQGFGYIKI |
| | ANTINDKGARTRKGAPWTFSTLSKMIKNPAYKGTYIMQKYGTVKVNGRKKKVINPKEKWVIFEDH |
| | HPAIISHELWEKVNNKDPNKFKKKRRVSTTNELRGITVCAHCGTAMSKRNSINISKNGTETEYSYMI |
| | CNWSRITARRECVRHVPIHYKDLRALVLSKLKEKEKDLDKEFGSDENQLQVKLRKLKKDINDLKF |
| | KRERLLDLYLEDERIDKDTFTIRNAKIEKEIGLKEMEIRKASNIEIQMKEKQEVRDAFALLEESKDLH |
| | SVFQKLIKRIEVAQDGAIDIYYRFEE |
| 325 | MYYERSYLRSCQVSTLEQKEHGYSIEEQERKLRSYCDINDWNVKDVYVDAGFSGAKRDRPELKRL |
| | LNDIKHFDLILVYKLDRLTRSVRDLLDLLEVFENNDVAFRSATEVYDTTTAMGRLFVTLVGAMAE |
| | WERETIRERTQMGKLAALKKGIMLTTPPFYYDRVDNKFVPNKYKEVVLFAYEEALKGKSAKSIAR |
| | KLNNSDIPPPNNRKWEDRSITRALRSPFTRGHFEWGGVYLENNHEPVITQEMYNKIKDRLNERVNT |
| | KVVAHTSVFRGKLTCPTCGTKLTMNTNKKKTRNGYTTHKSYYCNNCKITPNLKPVYIKEREVLRV |
| | FYDYLLNLNLEKYEIDEKQSEPEITVDIHKVMEQRKRYHKLYANGLMQEDELFDLIKETDEAIKEYE |
| | SQTENKVEKQFDIEGVKKYKKLLLEMWNVSTLEDKAEFVQMAIKSIEFDYIIDDGPPTSRKHSLKIN |
| | QIIFY |
| 326 | MKPRQWAAENTEEKPKLKVAAYCRVSTEMEEQASSYEAQVQHYTDYIQRNPDWELAGIFADEGIS |
| | GTGTKKRDGFNRMIEACQKGDVEYIITKSISRFARNTVDCLQYIRQLKDLHIAVFFEKENINTMDAK |
| | GEVLLTIMASLAQQESQSLSQNTKMGVQYRFQQGQLRINHNHFLGYTKDEDGNLVIEPKEAEVIKR |
| | IFREYLEGSSLQEIANGLMSDGILTGGKRKLWRGEGVRLILRNEKYMGDALLQKTYTTDFLTKKRV |
| | KNDGSYAQQYYVENSHPAIIPRDIFMQVQQELDRRKSMKNKHSQCFSGKYALSGITVCGDCGNAY |
| | RRVHWKNRGTVWRCKSRVDKREHNCSGRTIYEKDLHEAIIKAINETLVDREYFLQQLSENINSVLT |
| | DGLTGRLEELDSKLKELESEIISMAIGGQGYDELATKILALRNERDMVEREIAADANMQQRIDEMG |
| | DFVKNHDTISEYSEVLVRRLIEKVTIFEKDIVVDFKSGVNIAIEI |
| 327 | MAKELTKTASVAAYLRKSREDADQDDTLARHRKQLIDLVKQRGFENVDWYEEIGSADSIKNRPVF |
| | SDLLKKIENDEYDAVCVVAYDRLSRGNQIESGIISKAFKDTETLLITPTRTYDWSIEGDEMLSEFESM |
| | IARSEYRVIKKRLKQGKINAVKNGRLHSGNVPYGYKWDKNDKTAKIDKEKHEIYRLMVKWFLDEE |
| | YSATEIADKLNELGIPSPSGGSTWYSEVVADILTNDFHRGLVWYGKYRARKNGIGIEKNPDSSSIIM |
| | HKGNHEPMKSDEEHGAIIRRISKLRTFKPGRKLNKNTFKLSGLVRCPRCGKVQVVHTPKNRNPHVR |
| | KCLKKSKTRTTECNNTTGIPEEALYKAIVMKIREYNEVLFSKDSSEKKDEEARTYMNQILSLHEKAI |
| | SKSNKRIEKIKEMYMDEIIDKDEFKSRIDKEKKSILEAENEIRTLKESADYHDEIEHEQRKIKWNHEK |
| | VQEFIESDQGFTPSEINLILKLIISHVSYTMVKNEYGEFDVDLRVNFN |
| 328 | MNKVAVYVRVSTTSQLEEGYSIEEQKAKLESYCDIKDWNIYKIYTDGGFSGSTTDRPALEQLVQDA |
| | QSKLFDTVLVYKLDRLSRSQKDTLYLIEDIFLKNDIEFVSLLENFDTSTPFGRAVIGLLSVFAQLERE |
| | QIKERMQLGKLGRAKSGKSMMWAKTSYGYDYDKETGSMTVNEFEALAVKEIYASYLSGISITKLR |
| | DKMNAEYPKKPAWSYRTIRGILANPVYCGLNQYKGQTFQGTHKAIISLDDFEETQRELKKRQQTA |
| | QERLNPRPFQAKYMLSGLAQCGYCHAPLKVVLGQKRKDGTRTKRYECYQRHPRTTRGVTVYNDN |
| | KKCNSGYYYMDILEHYVLTRIAMLQNDPDKIQEIFSGGTSPVIDKQAIQKQIDSLSLKLSKLNDLYL |
| | DDRITLDELRSKSSDFIKQRAILEEEIKKASTDKQVGRRKKIEKLLDASSVIALMSYDNQKVIVRELIE |
| | KVQVTSDKIVIRWKI |
| 329 | MTVGIYIRVSTQEQANEGYSIGAQKERLIAYCAAQGWNDFKFYIDEGISAKDMNRPELQRLLDDVK |
| | NRRISMILVYRLDRFTRRVKDLYEMLEMLDKHNCSFKSATELYDTSNAMGRMFIGLVALLAQWET |
| | ENLSERIKVALEQKVSDGERVGAIPYGFDLTEDEKLIKNEKSKVVYDMIEKTFNGMSATQLANYLN |
| | KTNDDRTWHVKGVLRILKNPAIYGATRWNDKVYENTHEGIISKSQYKKLQEILNDRSKHHRREVT |
| | GNYLFQGKLSCPTCKKPLAVNRYLRKRKDGTEYQSTIYKCSSCYLKGKKIKQIGEKRFLDALYIYM |
| | KNIDLKGIEITEEPDETKHLTDQLKSLEKKREKYQRAWASDLISDSEFEHRMLETRELFEELKRKLSE |
| | KKKPIQVDIEEIKNVVFTFNQTFHFLTQEEKRMFISRFIKKIDYELIPQPPQRPDRCKYGKDLVTITDV |
| | LFY |
| 330 | MSDSLIRRLRCAVYTRKSTDEGLDQEYNSIDAQRDAGHAYIASQRAEGWIPVADDYDDPAYSGGN |
| | MDRPAIKRLMADIEAGKIDIVVIYKIDRLTRSLTDFARMVDVFERHGVSFVSVTQQFNTTTSMGRL |
| | MLNILLSFAQFEREVTGERIRDKIAASKRKGMWMGGIPPIGYDVVNRRLVLNDGEAKLVRHIFRRF |
| | GEIGSSTLLVKELRLDGVTSKAWTTQDGKVRKGRPIDKALIYKLLHNRTYLGELRHRDQWYPGEH |
| | PSIIDSELWDRVHAILSTNGRARASATRAKVAKVHCLLRGMVFGSDGRALSPISTVKKDGRRYRYY |
| | VPQREKKEHAGASGLPTLPAAELEAAVLDQLRAILRSPGLIGDMLPRAIALDPSLDEAMVTVAMTR |
| | LDAIWDQLFPAEQTRIVNLLVEKVIVSPDDLEVRLRANGIERLVLELRPATNGGAEEVMA |
| 331 | MWQENPPNDASPSSVTYRAAEYVRMSTEHQQYSTENQADKIREYAERRGIQIVRTYADEGKSGLSI |
| | DGRQALQQLIRDVESGQADFNAILVYDVSRWGRFQDADESAYYEYICKRAGIQVTYCAEQFENDG |
| | SPVSTIVKGVKRAMAGEYSRELSAKVFAGQCRLIELGYRQGGPAGYGLRRVLVDQSGTFKGELVR |
| | GEHKSLQTDRVILMPGPEQEVATVNQIYRWFVDDGLTESEIASRLNAGCVPTDLGREWTRATVRQ |
| | VLSNEKYIGNNIYNRISFKLKKHRVVNEPEMWIRKDGAFEAIVPPDIFYTAQGILRARSHRYSNEELL |
| | EKLRNLFRQRGVLSGLIIDEAEGMPSTAAYIHRFGSLLRAYEAVGFTPDRDYRFLEVNQFLRRLHPEI |
| | ISQTERMILDLGGSVQRDLATDLLDVNREFTVSMVLARCLVLDNGRRRWKVRFDASLLPDITVAV |
| | RLDESNESPLDYYLLPRLDFGQPGISLADHNRIEYESYRFENLDYLYGMAERYRLRRAA |
| 332 | MAKVYSYMRFSDPRQATGSSADRQLAYASAWASKHGMELDATLTLRDEGLSAYHETHVKQGAL |
| | GAFLRAIDAGRIPVGSVLIVEGLDRLSRAEPLLAQAQLGQIVSAGITVVTASDGREYNRDGLKAEPM |
| | NLVYSLLVMIRAHEESDTKSKRVKAAVRRQCEAWVAGSYRGRIVSGKDPQWLTWGGDSWQFIPE |
| | RVEAVRFALDAYRSGIGAARLVRLMHEKGMVLSDWGIAAQQVYRLVRLPALRGAKRISIDGEDFM |
| | LEDYYPRLLSDEEFSELETLVGQRYRRRGKDEIVGIVTGIGITRCGYCGTALVAQNLMQRVKADGS |
| | LVDGHRRLHCVSYSKNGGCNAGSCSSVPIEHAVLAYCSDQMNLQRLLEPSSADEELRTRLAEAQQ |
| | GVAEVERQLQRVTDALVADDSGAAPLSFVRKARELEEELERRRSAVRVLERELVAMASSVPVAEA |
| | SKWAELAEQAKSVSNVEAREQARQLVMDTFERIVVYMRGVVPEGRRSKYIDVLLVSRAGQSRWL |
| | RVGRRTGAWSAGGDWNGSAP |
| 333 | MGKNGARVYSYLRFSDPRQATGSSADRQLAYASAWASKHGMELDATLTLRDEGLSAYHETHVK |
| | QGALGAFLRAVDEGRIPAGSVLIVEGLDRLSRAEPLLAQAQLGQIVNAGITVVTASDGREYNREGL |
| | KAEPMNLVYSLLVMIRAHEESDTKSKRVKAAVRRQCEAWVAGSYRGRIVSGKDPQWLAWDGDS |
| | WQFIPERVEAVRFALDAYRSGIGAARLVRLMHEKGMVLSDWGIAAQQVYRLVRLPALRGAKRISI |
| | DGEDFMLEDYYPRLLSDEEFSELETLVGQRYRRRGKDEIVGIVTGIGITRCGYCGTALVAQNLMQR |
| | VKADGSLEDGHRRLHCVSYSKNGGCNGGSCSSVPIERAVLAYCSDQMNLQRLLEPSSAGEDLRPR |
| | LVEAQKVVAEIERQLERVTDALLADDSGAAPLAFVRKARELEEDLERRRSAVRALEQELVAKSAS |
| | APAAGASKWAELAERAKSMVDVDAREQARQLVMDTFETLVVYMRGVIPNPKGRYIDVMMKSRA |
| | GQTRWIRVDRRTGVWKEGADRPTTRRS |
| 334 | MSKARVYSYLRFSDPKQAAGSSADRQIEYARRWAAERNLELDDTLSLRDEGLSAYHQRHVKQGA |
| | LGVFLSAAEGGRIAPGSVLIVEGLDRLSRAEPIQAQAQLAQIVNAGITVVTASDGKEYNRERLRSQP |
| | MDLVYSLLVMIRAHEESDTKSKRVKAALRRQCQQWIDGKWRGIIRSGRDPHWVEIRDGQFALVPE |
| | RVAAVREALALFSRGHGKTKILRTLTERGLSMSNAGNHGTFIYRLVRNPMLMGTRVFEIDKEEFRL |
| | QGYYPALLSPEEFAVLQHLADERKGTRVKGEIPGLLTGLGITHCGYCGAAMVAQNYMGRARKAD |
| | GTPQDGHRRLHCVSDSQNSGCVVAGSVSIVPIERAIMTFCADQMNLTKLIEGDDGSAAVAGRLALA |
| | RQKASGLQAQLERLTTALLADDGNAPPATFLRRARELEEQLSAERRVIESLEREVLASASTTAPAAA |
| | DVWAKLTHGVLALDYESRVRARQLVADTFSRIVIYHAGFRPGEGTEKRIGIQLVAKHGNVRMLDV |
| | DRKSGGWRAAEDFDLRALT |
| 335 | MKGESELDKKAAIYIRVSTQEQATEGYSIQAQTDRLTKYVEAKDFILYKKYIDAGYSASKLERPAM |
| | QELIQDVQSKKVDVIIVYKLDRLSRSQKDTMYLIEEIFRPNDVELISMQESFDTSTAFGSATVGMLSV |
| | FAQLERKSISERMITGRVERAKKGFYHTGGQDRPPAGYQFNSDNQLIINEYEAAAIKDLFRLYNDGL |
| | GKSSISEYLKKNYPGKNKWLPSSIDRMLKNSLYIGKVKFSGAEYDGIHEPIIDEVTFYKTQKEIARRK |
| | QSNTKRYNYVALLGGLCECGICGAKMANRRAVGRKGKVYRYYRCYSKKGSPKHMMKTDGCSSK |
| | AQQQFIIDEAVINNLKNIDVEAELKRRSAPQTNTSLISSQIESIDKQINKLIDLFQVDSMPLDVISEKID |
| | KLNKEKQSMEKLLERKNKLDKTELQHRFDVLKSFDWDNSSIESKRVVIEMLVQKVIIHDNSIEIILVE |
| 336 | MKTTNKVAIYVRVSTTSQVEEGYSIEEQKDKLESYCKIKDWSVYKVYTDGGFSGSNTNRPAIEQLI |
| | KDAQKKKFDTVLVYKLDRLSRSQKDTLHLIEDVFIKNGIEFLSLQENFDTSTPFGKAMIGLLSVFAQ |
| | LEREQIKERMQLGKIGRAKAGKSMMWAKTSYGYDYHRETGTITINPAQALTIKFIFESYLRGRSITK |
| | LRDDLNEKYPKHVPWSYRAVRTILDNPVYCGFNQYKGEIYPGNHESIISKEEYDKTQSELKIRQRTA |
| | AENVNPRPFQAKYILSGIAQCGYCGAPLKIMLGVKRKDGSRLKKYECHQRHPRTLRGVTTYNDNK |
| | KCDSGFYYKDKLEAYVLTEISKLQDNAVYLDKIFSGDNAETIDRESYKKQIEELSKKLSRLNDLYID |
| | DRITLEELQSKSAEFISMRGTLETELENDPALRKNKRKADMRKLLNAEKIFSMDYEGQKVLVRGLI |
| | NKVQVTAEDIVINWKI |
| 337 | MLIQTKIRRFNMKKVFVYHRVSSDQQLDGSGIARQAELLEGYLERTGICAEMDDPAPVVLSDQGVS |
| | AFKGLNISEGELGAWMEQVRNGMWDSSILVVESIDRFSRQNPFDVMGYINALMAHNVAIHDVMA |
| | NIVISRSNSKDLPFVMMNAQRAYDESKYKSDRIRKGWAKKREQAFNKGTIVTNKRPQWIEVENDK |
| | YVLNHKAAVVKEIFALYQTGMGCPTIAKQLQTKEGEQYKFNRPWTGELVHKILTNRRVTGKIFISEI |
| | IRNHDDIENPVTQKKYDMDVYPVVINEEEFELVQELLKSRRPNAGRVTVKKDGQEEVLIKSNLFSGI |
| | ARCTECGGPMYHNVVRAKRTPKKGDPKIEEYRYIRCLNERDGLCENKAMTYETVERFVVEHLLSM |
| | DLNTVIKEQEFNPEIEVIRIQIDQVKDQITKEGANKQVISSQADSLIKISRIWADFFPANTSNQPI |
| 338 | MKLPDTFRSPPPDEEGEAYIGYVRVSTYKEEKISPELQREAILAWAKKTRRRIVKWVEDLDVSGRH |
| | FKRKITKCVEDVEAGTVQGVAVWKYSRFGRDRTGNALWLARLEEVGGQLESATEPVDATTAIGRF |
| | QRGMILEFAAFESDRAGEQWRETHNYRKYTLGLPAQGRARFGYVWHRRFDAATGVLQKERYEPD |
| | PETGPLVASLYHLYVAGTGFATLVIKLNEGGHQTIQGARWTNETLTRHMDSGFAAGLLRVHNPEC |
| | RCRNTGGSCRNKIYIQGAHEELIDWDIWEAYQRRRAVVRASHPRARNSLYTLTGLPSCGGCRWGA |
| | SVTNTSYGGEYRRAFAYRCGLRAKAGATACDGVFIVRTKVEHAVEEWLMDKAARGIDMAPSTGP |
| | GPTLTPIDDQAARARARVSAQADVDRHRAALARLRAEHAELPEDWGPGEYEDAVDVIRKKRAEA |
| | QSILDNLPDADPAPDRAEAQQLIASTAEAWPALDDRQKNALLRQMIRRVVLTRTGRGTADIEVHPL |
| | WEPDPWSKQVSPT |
| 339 | MNVAIYCRVSSQEQANEGYSIHEQERKLKSFCEVNNWKNYKVFVDAGVSGGTINRPAFNNLLANL |
| | DKFDLVLVYKLDRLTRSVRDLLSLLETFEEHGVSFRSATEVFDTTSAIGKLFITIVGAMAEWERSTIR |
| | ERSLFGSHAAVREGNYIRVAPFCYDNIDGKLVPNEHKKVIEYIVKKLLEGVTATEIARRLNNANNYP |
| | PTIKNWSKTTVIRLVNNPVMRGHTKHGDLFIENTHEPIITEHNYKRISERLSSRVNYKKQTHTSVFRG |
| | VLECPQCGHKLHYFKSKLKNKNKTYYSEGYRCDYCRTDKTARNIAITFSEIEREFIEYMSNIRLSEN |
| | YCIEVEPKNEVVKIDINKIMRKRSRFQEAYGDGLMTKEEFKQKMFETQKLIDEYEGMENEKDVDD |
| | HITKEQVQAIQNLFRHIWDSPSVSREDKEEFVRQSIKKIDFDFIPKSKVNKTPNTLKINNIDLHF |
| 340 | MKTIHKLARPQLPEPPKLKVAAYARVSTSSNEQLASLQTQITHYENHIQNNDQWEYVGVYYDEGT |
| | SGTKVEKRDGLHRLIKDAELGKIDLILTKSISRFSRNTVDCLNLVRKLTDIGVTIFFEKENINTGDMES |
| | ELLLSILSSLAESESYSHSENMKWANRKRMAKGIFKTVPPYGYQRKGADFYLIPDEAKVIEQIFKWA |
| | LEGVSAYQVAKRLNEKNIFTRKGSKWQDSGINNILHNIVYTGTMIHQRYFNDDQFRKKKNNGELP |
| | MYRIDNNHPPIISWEDYERVQELITLRANAKGTSKGSQKYSQRYVFTKRIICDKCGCNYKRVHIAGK |
| | GNTKVVKWSCTGHLKNKDGCYALPITDESLKTAYLTMLNKLILGHTIVLEPLINTPVEGKASKQEL |
| | EKLSIEITKIDEKLEVLASLNASGVVSTKTALEEQGRLQMELNKLQEKQHKIMESVNGTSTQRIQLE |
| | QLHQFTKRSEMLTEWDEDLFLRFAELIVVYSRQEVSFELKCGLLLKERLEA |
| 341 | MKPRQWAAENTEEKPKLKVAAYCRVSTEMEEQASSYEAQVQHYTDYIQRNSDWELAGIFADEGIS |
| | GTGTKKRDGFNRMIEACQKGDVEYIITKSISRFARNTVDCLQYIRQLKDLHIAVFFEKENINTMDAK |
| | GEVLLTIMASLAQQESQSLSQNTKMGVQYRFQQGQLRINHNHFLGYTKDEDGNLVIEPKEAEVIKR |
| | IFREYLEGSSLQEIANGLMSDGILTGGKRKLWRGEGVRLILRNEKYMGDALLQKTYTTDFLTKKRV |
| | KNDGSYAQQYYVENSHPAIIPRDIFMQVQQELDRRKSMKNKHSQCFSGKYALSGITVCGDCGNAY |
| | RRVHWKNRGTVWRCKSRVDKREHNCSGRTIYEKDLHEAIIKAINETVVDREDFLQQLSENINSVLT |
| | DGLTGRLEELDSKLKELESEIISMAIGGQGYDELASQIFSLRDERDAVAKQIAANTNLQQRVDEMVV |
| | FVKEHDVINEYSEVLVRRLIEKVTIFEKNIVVDFKSGVRVTVEI |
| 342 | MKAAIYSRKSVFTGKGESVENQIQMCKEYGEKNLGIKEFVIYEDEGFSGGNTKRPKFQELLRDVKK |
| | KKFDTLICYRLDRISRNVADFSTTLELLQDNNISFVSIKEQFDTSTPMGKAMVYIASVFAQLERETIA |
| | ERIRDNMLELAKTGRWLGGQTPLGFKSEKISYFDAEMKERTMYKLSPENKELELVKLIYNKYLETG |
| | SIHLTLKYLLSNSIKGKNGGEFASMSINDILRNPVYVRSNQMVIDYLKDKGMNVCGTANGNGILIY |
| | NKRNSKYKKKDINEWIAAVSKHKGIIPANTWIEVQKTLDKNSSKSTPRQGTSKKSILSGVLKCSRCS |
| | SPMRVTYGRKRKDGTSIYYYTCTMKAHSGKTRCDNPNVRGDYLEKAIIKKLQNLNSDVVIKELEE |
| | YKKQLAATTENSIIKNISKEIEEKKKEMDSLLKQLSKVESPVASEFIISKVDSLGTEIKDLEISLTKTNS |
| | KKKENSNIELNIEIVLQSLKEFNTFFNSVESLKTDELTIQRKRYLLERAVDEITIDGETKKIGIDLWGS |
| | KKK |
| 343 | MELKNIVNSYNITNILGYLRRSRQDMEREKRTGEDTLTEQKELMNKILTAIEIPYELKMEIGSGESID |
| | GRPVFKECLKDLEEGKYQAIAVKEITRLSRGSYSDAGQIVNLLQSKRLIIITPYKVYDPRNPVDMRQI |
| | RFELFMAREEFEMTRERMTGAKYTYAAQGKWISGLAPYGYQLNKKTSKLDPVEDEAKVVQLIFKI |
| | FLNGLNGKDYSYTAIASHLTNLQIPTPSGKKRWNQYTIKAILQNEVYIGTVKYKVREKTKDGKRTIR |
| | PEKEQIVVQDAHAPIIDKEQFQQSQVKIANKVPLLPNKDEFELSELAGVCTCSKCGEPLSKYESKRIR |
| | KNKDGTESVYHVKSLTCKKNKCTYVRYNDVENAILDYLSSLNDLNDSTLTKHINSMLSKYEDDNS |
| | NMKTKKQMSEHLSQKEKELKNKENFIFDKYESGIYSDELFLKRKAALDEEFKELQNAKNELNGLQ |
| | DTQSEIDSNTVRNNINKIIDQYHIESSSEKKNELLRMVLKDVIVNMTQKRKGPIPAQFEITPILRFNFIF |
| | DLTATNNFH |
| 344 | MKGESELDKKAAIYIRVSTQEQATEGYSIQAQTDRLTKYVEAKDFILYKKYIDAGYSASKLERPAM |
| | QELIQDVQSKKVDVIIVYKLDRLSRSQKDTMYLIEDIFRPNDVELISMQESFDTSTAFGSATVGMLS |
| | VFAQLERKSISERMITGRVERAKKGFYHTGGQDRPPAGYQFNSDNQLIINEYEAAAIKDLFRLYND |
| | GLGKSSISEYLKKNYPGKNKWLPSSIDRMLKNSLYIGKVKFSGAEYDGIHEPIIDEVTFYKTQKEIAR |
| | RKQSNTKRYNYVALLGGLCECGICGAKMANRRAVGRKGKVYRYYRCYSKKGSPKHMMKTDGCS |
| | SKAQQQFIIDEAVINNLKNIDVEAELKRRSAPQTNTSLISSQIESIDKQINKLIDLFQVDSMPLDVISKK |
| | IDKLNKEKQSMEKLLERKNKLDKTELQHRFDVLKSFDWDNSSIESKRVVIEMLVQKVIIHDNSIEIIL |
| | VE |
| 345 | MAGAKNITVIPARKRVGNTATPDNKPKLKVAAYCRVSTDSDEQATSYDAQVEHYTEFIRKNFEWE |
| | FAGIYADDGISGTNTKKREEFNRMIEDTMAGKIDMIITKSISRFARNTLDCLKYIRQLKEKNVPVFFE |
| | KENINTMDSKGEVLLTIMASLAQQESESLSKNVKMGLQFRYQNGEVQVNHNWFLGYTKDENGHLI |
| | IDEEQAVVVRRIFREYLQGASLKSIADGLMADGIPTATGNKKWRGDGIRKILTNEKYMGDALLQKT |
| | YTVDVLTKKRVSNNGIVPQYYVENNHEAIIPRQLFMQVQEELLRRAHLKTENGKTKRVYSSKYALS |
| | SIVYCGKCGDLFRRVAWKARGASYNKWRCASRIEKGPKEGCDADAISEVELQNAVVRAINKTLGG |
| | REQFLLQLQHNIEEVLNGDSTATLEYIDQRMAKLQEKLVMCVNKNVEYDVIANEIDALREKKASV |
| | VTKDAEQEMLKKRIDEMRQFLQTQTNRVTEYDEQMVRRLIEKITVFDDKLIFEFKSGMTIELKR |
| 346 | MRNVTKIDQVDLSIFKRLRVAAYCRVSTDSNEQELSLDTQRKHYESYIKANSEWEYAGIYYDDGIS |
| | GTKTAKRDGLLRLVEDCEKGLIDLVITKSISRFSRNTTDCLTLVRKLLNYDVYIIFEKENIHTGSMES |
| | ELMLAILASMAESESRSISENEKWSIKKRFQNGTYVISYPPYGYANVNGEMVIVPEQAEVVKEIFAG |
| | CLAGKSTHVIAKELNEKGVPSKKGGKWTGGTINGILTNEKYIGDALFQKTITDAAFKRKRNYGEEE |
| | QYYCEEHHEAIIDRETFEKAKEAIRQRGLGKGNCSEDISKYQNRYAMSGKIKCGECGRSFKRRYHY |
| | TSHGRSYNAWCCSGHLEDSKSCSMKYIRDDDLKRVFLTMMNKLRFGNDLVLKPLLIAITTDNSKK |
| | NIHSVEEIEKEIAANEEQRNHLSTLLTRGYLERPVFTDAHNKLITEYEHLLAKRDLLYRMDDAGYT |
| | MEQKLKELVDFLNGTEPFTEWDDTLFERFIEKVNVLSRDEVEFEFKFGLRLKERMD |
| 347 | MNTKITPQHQSKPAYIYIRQSTLAQVRHHQESTERQYALRDKALALGWPETAIRVLDRDLGQSGAQ |
| | MTGREDFKTLVADVSMGNVGAVFALEVSRLARSNLDWHRLLELCALTHTLVIDADGCYDAGDFN |
| | DGLILGLKGTMAQAELHFLRGRLQGGKLNKAKKGELRFPLPVGLCYGDDGRIVLDPDDEVRGAVQ |
| | LAFRLFQETGSAYAVVKRFAEEGLRFPKRAYGGAWAGRLIWGRLSHGRVLGLIRNPSYAGIYVSG |
| | RYQYRQRITAQAEVHKHVQPVPKTEWRVHLPDHHDGYITPEEFERNQEHLAQNRTNGEGTVLSGA |
| | AREGLALLQGLLICGGCGRALTVRYQGNGGLYPLYLCSARRREGLATTDCMSMRSELLDNAIGEA |
| | VFTALQPAELELAVTALSELEQRDHAIMRQWHMRIERAEYEVALAERRYQECDPANRLVAGTLER |
| | RWNDAMLHLEAIRTESAQFQSQKALVATSEQKAQVLALARNLPRLWRAPTTSAKDRKRMLRLLIR |
| | DITVERRSATRQALLHIRWQGSACTDITVDLPKPAADAMRYPAAFVEQVRELSQHLPDRQIVAHLN |
| | QEGLRSSTGKSFTLEMVKWIRYRYRIEVTCFKRPDELTVQQLAHRLHVSPHVVYYWIERQVVQAR |
| | KLDGRGPWWIALDAAKERQLDDWVRTSGHLQRQHSNTQL |
| 348 | MTKAAIYIRVSTQDQVENYSIEVQRERIRAYCKAKGWDIYDEYIDGGYSGSNLDRPDIKRLLNDLK |
| | KIDVVVVYKLDRLSRSQRDTLELIEEHFLKNNVDFVSITETLDTSTPFGKAMIGILSVFAQLERETIAE |
| | RMRMGHIKRAENGLRGNGGDYDPSGYTRVDGHLILNPNEAKHIKRAFDLYEQYHSITRVQEVLKE |
| | EGYTIWRFRRYRDVLSNTLYIGQITFAGKTYKGQHEPIVSLEQFKRVQALLKRHKGHNAHKAKQSL |
| | LSGLITCSCCGEKFVAYSTGKSKDIESKRYYYYICRAKRFPSEYDEKCLNKTWSRKKLEEVIFDELK |
| | NLTVKKSASQKKEKKINYEKLIKDIDKKMERLLDLFTNTTNISRQLLETKMDKLNLEKEHLILKQQS |
| | YEQEFSISKDMITTINESLETMDFKDKQIIINTFIQEIHIDHDVVDIIWR |
| 349 | MEINKLKAALYVRVSTTEQANEGYSISAQTEKLTNYAKAKDYQIVKTYTDPGISGAKLDRPALQN |
| | MITDIEKGMIDIVLVYKLDRLSRSQKNTLYLIEDVFLKNKVDFISMNESFDTSTSFGRAMIGILSVFA |
| | QLERDAITERTRMGKIERAKEGKWQGGGNFAPFGYRYENDILKVNEFEKIIVQEMFDLYLEGYGTN |
| | KIAEILGTKYPGKVKSPNLVKGILRNKIYIGKINFAGEIYDGLHETFIDKKIFQNVQEIYGKRANKTY |
| | KGDYNQKGLLLGKIYCAKCGAKYYRQVTGSVKYRYVKYACYSQNRSLSSKTMVKDRNCVNKRY |
| | NAEELEQSTIDKINKLTVAELTSTTNLKLLDNRKTIEKEIKNLESQINKLIDLFQLGNISTELLSSRIDN |
| | LNIQKNNLEIELSKLKKVKTKKEIESKLQTLKDFDWDTETTINKIKMIDEFIDKITINDDEVLIHWRL |
| 350 | MRTVRRIQPIKSPCSPKLKVAAYARVSDSRLHHSLSTQISYYNRLIQAHPDWELVGIYYDEGISGKE |
| | QSNRQGFQNIIKDCDNGKIDRIITKSIARFGRNTVELLTTVRQLRLKNIGVTFEKENIDSLSSEGELML |
| | TLLASVAQEESQNMSENIRWRVQKKFENGMPHTPQDMYGYRWDGEQYQIEPNEAKVIRNVFKWY |
| | LDGDSVQQIVDKLNQEHVLTRLGNPFTVASIREFFKQEAYFGRLVLQKTYREAFSRNPKRNKGQRT |
| | KYIIENAHEPIVTKEYFELVLHEKERRYQLMHQESHLNKGIFRDKIFCSDCGCLMIVKVDSKHVKKT |
| | VRYYCRTRNRFGASSCPCRTLGEKRLLASFKSKLGSVPDKEWVENNIKRIEYDFGHRIIKVTPVKGR |
| | KYPIEIRGGRY |
| 351 | MKKVITIEATPSIIRSSSDDFSLKKRRVAGYARVSTDHEDQATSYESQMRYYSEYINGRDDWEFVK |
| | MYSDEGISGTNTKLRTGFKSMVEDALNGKIDLIITKSVSRFARNTVDSLTTVRQLKEVGVEIYFEKE |
| | NIWTLDSKGELLITIMSSLAQEESRSISENVTWGLRKQFAEGKVHFPYTNVLGFKAGEDGAIVVDQD |
| | EAKTVRYIFQQALIGKSPYHIARDLTEQGIPSPSGKSQWNATTIKRMLRNEKYKGDALLQKTYTIDF |
| | LTKKKNINRGELPQYYVENNHEAIVDRETFDAVQQVLDNKGRKSSTTIFSSKLVCGDCGHFFGSKV |
| | WHSTSKYRRVIYRCNEKYNGSSKCSTPHVTEEEVKQWFVSAVNQVIDNRLEVIDNLSVLLSIGSFEV |
| | IDEQIKNLETDAEVVSQLVANLVSENAIISQDQDKYLKKYNQLTSKYEGIVREIESLELQRMEKSKR |
| | NKELQVFMEFLNNQEGLLTDFDELLWETMVESITINLEKKIFFKFKNGAVATI |
| 352 | MRKVAIYSRVSTINQAEEGYSIQGQIEALTKYCEAMEWKIYKNYSDAGFSGGKLERPAITELIEDGK |
| | NNKFDTILVYKLDRLSRNVKDTLYLVKDVFTANNIHFVSLKENIDTSSAMGNLFLTLLSAIAEFERE |
| | QIKERMQFGVMNRAKSGKTTAWKTPPYGYRYNKDEKTLSVNELEAANVRQMFDMIISGCSIMSIT |
| | NYARDNFVGNTWTHVKVKRILENETYKGLVKYREQTFSGDHQAIIDEKTYNKAQIALAHRTDTKT |
| | NTRPFQGKYMLSHIAKCGYCGAPLKVCTGRAKNDGTRRQTYVCVNKTESLARRSVNNYNNQKIC |
| | NTGRYEKKHIEKYVIDVLYKLQHDKEYLKKIKKDDNIIDITPLKKEIEIIDKKINRLNDLYINDLIDLP |
| | KLKKDIGELNHLKDDYNKAIKLNYLDKKNEDSLGMLMDNLDIRKSSYDVQSRIVKQLIDRVEVTM |
| | DNIDIIFKF |
| 353 | MRKVAIYSRVSTINQAEEGYSIQGQIEALTKYCEAMEWKIYKNYSDAGFSGGKLERPAITELIEDGK |
| | NNKFDTILVYKLDRLSRNVKDTLYLVKDVFTANNIHFVSLKENIDTSSAMGNLFLTLLSAIAEFERE |
| | QIKERMQFGVMNRAKSGKTTAWKTPPYGYRYNKDEKTLSVNELEAANVRQMFDMIISGCSIMSIT |
| | NYARDNFVGNTWTHVKVKRILENETYKGLVKYREQTFSGDHQAIIDEKTYNKAQIALAHRTDTKT |
| | NTRPFQGKYLLSHIAKCGYCGAPLKVCTGRAKNDGTRRQTYVCVNKTESLARRSVNNYNNQKICN |
| | TGRYEKKHIEKYVIDVLYKLQHDKEYLKKIKKDDNIIDITPLKKEIEIIDKKINRLNDLYINDLIDLPK |
| | LKKDIEELNHLKDDYNKAIKLNYLDKKNEDSLGMLMDNIDIRKSSYDVQSRIVKQLIDRVEVTMDN |
| | IDIIFKF |
| 354 | MRKVAIYSRVSTINQAEEGYSIQGQIEALTKYCEAMEWKIYKNYSDAGFSGGKLERPAITELIEDGK |
| | NNKFDTILVYKLDRLSRNVKDTLYLVKDVFTANNIHFVSLKENIDTSSAMGNLFLTLLSAIAEFERE |
| | QIKERMQFGVMNRAKSGKTTAWKTPPYGYRYNKDEKTLSVNELEAANVRQMFDMIISGCSIMSIT |
| | NYARDNFIGNTWTHVKVKRILENETYKGLVKYREQTFSGDHQAIIDEKTYNKAQIALAHRTDTKTN |
| | TRPFQGKYMLSHIAKCGYCGAPLKVCTGRAKNDGTRRQTYVCVNKTESLARRSVNNYNNQKICN |
| | TGRYEKKHIEKYVIDVLYKLQHDKEYLKKIKKDDNIIDITPLKKEIEIIDKKINRLNDLYINDLIDLPK |
| | LKKDIEELNHLKDDYNKAIKLNYLDKKNEDSLGMLMDNLDIRKSSYDVQSRIVKQLIDRVEVTMD |
| | NIDIIFKF |
| 355 | MRKVAIYSRVSTINQAEEGYSIQGQIEALTKYCEAMEWKIYKNYSDAGFSGGKLERPAITELIEDGK |
| | NNKFDTILVYKLDRLSRNVKDTLYLVKDVFTANNIHFVSLKENIDTSSAMGNLFLTLLSAIAEFERE |
| | QIKERMQFGVMNRAKSGKTTAWKTPPYGYRYNKDEKTLSVNELEAANVRQMFDMIISGCSIMSIT |
| | NYARDNFVGNTWTHVKVKRILENETYKGLVKYREQTFSGDHQAIIDEKTYNKAQIALAHRTDTKT |
| | NTRPFQGKYMLSHIAKCGYCGAPLKVCTGRAKNDGTRRQTYVCVNKTESLARRSVNNYNNQKIC |
| | NTGRYEKKHIEKYVIDVLYKLQHDKEYLKKIKKDDNIIDITPLKKEIEIIDKKINRLNDLYINDLIDLP |
| | KLKKDIEELKHLKDDYNKAIKLNYLDKKNEDSLGMLMDNIDIRKSSYDVQSRIVKQLIDRVEVTMD |
| | NIDIIFKF |
| 356 | MLRVALYIRVSTEEQALNGDSIRTQIEALEQYSKENDFNIVGKYIDEGCSATNLKRPNLQRLLRDVE |
| | KDKVDLVLMTKIDRLSRGVKNYYKIMETLEKHKCDWKTILENYDSSTAAGRLHINIMLSVAENEA |
| | AQTSERIKFVFQDKLRRKEVISGTIPIGYKIENKHLVIDKEKKYIVKAIFDEYEKSGSVRTLIETINNLH |
| | GELYSYNKIKNILRNELYIGIYNKRGFYVEDYCEPIISKKQFKQIQRILEKNKKTTPNKNIHYHIFSGL |
| | LKCKECGYTLKGNSSNVGEKLYLSYRCSTFYLNKNCVHNVTHNEKHIENYLLTNLKPQLHKHMVK |
| | LEAQNEKIRRNKKSNKKDEKKKIMKKLDKIKDLYLEDLIDKETYRKDYEKLQSQLDNITEEQESQII |
| | DTSHIKKFLDIDINEMYSDLSRVERRRFWLSIIDYIEIDNNKNITINFI |
| 357 | MQQLIKDADTGLYDAVLVYKLDRLSRSQKDTLYLIEDVFQKNNIHFISLSENFDTSTAFGKAMIGIL |
| | SVFAQLEREQIKERMSMGRVGRAKSGKIMEFNNPAFGYEVDGDNYKVDPLRAEIVKRIYKMYLSG |
| | TSINKIKETLNLEGHIGNKKNWSDTRIRYILSNPTYLGKIRYDGKTYDGKFSPIIDEETFNKTQNELKE |
| | RQTATYKRFNMKLRPFQSKYMLSGLLRCGYCGATLFVNSYVYNGKRKLRYNCPSTYKSKQKTRT |
| | YKIMDPNCPFKLVYAKDLEPAVINEIKNLALNPQSIQKPVKKKPDIDVEAIQKELAKVRKQQQRLID |
| | LYVISDDVNIDNISKKSADLKLQEETLKKQLAPLEEPNDDDKIVAFNEILAQIKDIDSLDYDKQKFIV |
| | KKLIKKIDVWNDNKIKIHWNI |
| 358 | MAVGIYIRVSTQEQASEGHSIESQKKKLASYCEIQGWDDYRFYIEEGISGKNTNRPKLKLLMEHIEK |
| | GKINILLVYRLDRLTRSVIDLHKLLNFLQEHGCAFKSATETYDTTTANGRMSMGIVSLLAQWETEN |
| | MSERIKLNLEHKVLVEGERVGAIPYGFDLSDDEKLVKNEKSAILLDMVERVENGWSVNRIVNYLNL |
| | TNNDRNWSPNGVLRLLRNPALYGATRWNDKIAENTHEGIISKERFNRLQQILADRSIHHRRDVKGT |
| | YIFQGVLRCPVCDQTLSVNRFIKKRKDGTEYCGVLYRCQPCIKQNKYNLAIGEARFLKALNEYMST |
| | VEFQTVEDEVIPKKSEREMLESQLQQIARKREKYQKAWASDLMSDDEFEKLMVETRETYDECKQK |
| | LESCEDPIKIDETYLKEIVYMFHQTFNDLESEKQKEFISKFIRTIRYTVKEQQPIRPDKSKTGKGKQKV |
| | IITEVEFYQ |
| 359 | MRICMYLRKSRADEELEKTLGEGETLSKHRKALLKFAKEKNLNIVEIKEEIVSGESLFFRPKMLELL |
| | KEIENKQYSGVLVMDMQRLGRGNMQDQGIILETFKKSNTKIITPMKTYDLSNDFDEEYSEFEAFMS |
| | RKELKMINRRMQGGRVRSVEDGNYIATNAPYGYDIHWINKARTLKPNQKESEIVKLIFKLYIEGNG |
| | AGTIAKHLNSLGYKTKFGNSFNNSSIIFILKNPVYIGKITWKKKDIRKSKDPNKVKDTRTRDKSEWII |
| | VDGKHDPIIDQITWKQAQEILNNRYHVPYKLVNGPANPLAGLIICTTCKSKMVMRKLRGTDRILCK |
| | NNKCNNISNRFDAVEKSVVESLENYLKAYKVNLPELNKTSNLKLYEQQISTLKKELKILNEQKLKLF |
| | DFLERGIYDEDTFLKRSKNLDERIEITNESLSNLNQIIAKENKAIKKEDIIKFEKVLDSYKSTADIRLKN |
| | ELMKTLIFKIEYTKNKKGNDFKIKVFPKLKPLNI |
| 360 | MIAAIYSRKSKFTGKGESVENQIEMCKEYLKRNFNNIDDIEIYEDEGFSGKDTNRPKFKKMIKAAKN |
| | KKFNILICYRLDRISRNVADFSNTIEELQKYNIDFISIKEQFDTSTPMGRAMMNIAAVFAQLERETIAE |
| | RIKDNMVELAKTGRWLGGTSPLGYKSEPIEYSNEDGKSKKMYKLTEVENEMNIVKLIYKLYLEKR |
| | GFSSVATYLCKNKYKGKNGGEFSRETARQIVINPVYCISDKTIFKWFKSKGATTYGTPDGIHGLMV |
| | YNKREGGKKDKPINEWHAVGKHRGVISSDIWLKCQNLIQQNNAKSSPRSGTGEKFLLSGMVVCKE |
| | CGSGMSSWSHFNKKTNFMERYYRCNLRNRASNRCSTKMLNAYKAEEYVANYLKELDINAIKKMY |
| | HSNKKNIIDYDAKYEVNKLNKSIEENKKIIQGIIKKIALFDDLDILGMLKNELERLKKENDEMKIKLK |
| | ELKSILELEDEEEIFLSTMEENISNFKKFYDFVNITQKRILIKGLVESIVWDTGGEEKILEINLIGSNTKL |
| | PSGKVKRRE |
| 361 | MKVAIYTRVSTLEQKEKGHSIEEQERKLRAYSDINDWTIQGVYVDAGYSGAKTDRPELNRLKENLS |
| | KIDLVLVYKLDRLTRNVKDLLDLLEIFERENVSFRSATEVYDTSTAMGRLFVTLVGAMAEWERETI |
| | RERAMMGKQAAIRKGMILTPPPFYYDRVDNKYIPNKYKDVVVWAYEEVKKGNSAKGIARKLNAS |
| | DIPPPNGIQWEDRTITRALRSPLSKGHYFWGDIFIENSHEPIITDEMYNEIKERLNERVNAKTITHTSV |
| | FRGKLICPNCNGRLCLNTSYRKLKRGDVIHKNYYCNNCKVNKSGAFSFTEKEALKVFYDYLSKLD |
| | LSKYKAKEKEDKKIVTIDINKVMEQRKRYHKLYANGMMQEEELFELIKETDEKISEYEKQKERVPK |
| | KRLDVSKIKNFKNILLDSWNAFTLEDKEDFIKMAIKSIEIEYIHVKRGKTKHSIKIKNIDFY |
| 362 | MKTAIYLRKSRADLEAEARGEGETLAKHRSTLLKIAKEMNLNVLSVREEIVSGESLVKRPEMLALL |
| | EEIEDNKYDAVLCMDMDRLGRGGMKEQGIILETFKRSNTKIMTPRKTYDLNDEWDEEYSEFEAFM |
| | ARKELKIITRRMQRGRIASVEAGNYLGTHAPFGYDIHRLNKRERTLTINSEEASVVRMIFDWYANED |
| | MGASAIRNKLNDLGYKSKLGNDWNPYSILDILKNNIYIGKVTWQKRKEVKRPDAVKRSCARQDKS |
| | DWIIADGKHEPIIPESLFEQAQEKLNSRYHVPYNTNGIKNPLAGIIKCSKCGYSMVQRYPKNRKETM |
| | DCKHRGCENKSSYTELIEKRLLEALKEWYINYKADFEAHKQGDKLKETQVIQMNEAALRKLEKEL |
| | VDVQKQKNNLHDLLERGVYTVDMFLERSQVISDRINEITSTMENLKKEIKTEIKKEKVKKDTIPQVE |
| | HVLDLYFKTDDPKKKNSLLKSVLEKAVYKKEKWQRLDDFELVLYPKLPQDGDI |
| 363 | MLRCAIYIRVSTEEQAMHGLSMDAQKADLTDYAKKHNYEIIDYYVDSGKTARKRLSKRKDLQRMI |
| | EDVKLNKIDIIIFTKLDRWFRNVRDYYKIQEVLEDHNVDWKTIFENYDTSTANGRLHINIMLSVAQD |
| | EADRTSERIKRVFENKLKNNEPTSGSLPIGYKIKEKSIIIDEEKAPIAKDVFDFYYYHQSQTKVFKEIL |
| | NKYNLSLCEKTIRRMLENKLYIGIYREHENFCPPLIDKNKFDEVQLILKRRNIKYIPTKRIFLFTSLLIC |
| | KECRHKMIGNAQIRNTKAGKIEYILYRCNQSYARHTCNHRKVIYENKIETYLLNNIESELKKFIYDY |
| | ELEDIPKVKNKVNKTNIKRKLEKLKELYINDLIDIDMYKEDYKKYTEILNTKEEKIEQRNLQPLKDF |
| | LNSDFKSLYSSISREEKRLLWRGIISEIQIDCNNDITIIPHP |
| 364 | MYRPESLDVCIYLRKSRKDVEEERRAIEEGSSYNALERHRKRLFAIAKAENHNIIDIFEEVASGESIQE |
| | RPQMQQLLRKLEGNEIDGVLVIDLDRLGRGDMLDAGMIDRAFRYSSTKIITPTDVYDPDDESWELV |
| | FGIKSLISRQELKSITKRLQNGRIDSVKEGKHIGKKPPYGYLKDENLRLYPDPEKAWIVKKIFELMCD |
| | GKGRQMIAAELDRLGIDPPVTKRGAWDSSTITSIIKNEVYTGVIVWGKFKHKKRNGKYTRHKNPQE |
| | KWIMYENAHEPIISKELFDAANEAHSSRHKPAVITSKKLTNPLAGILKCKLCGYTMLIQTRKDRPHN |
| | YLRCNNPACKGKQKQSVFNLVEEKLLYSLQQIVDEYQAQKVEEVEIDDSKLISFKEKAIISKEKELK |
| | ELQAQKGNLHDLLEQGIYTVEIFLERQKNLVERITSIENDIEVLQKEIETEQIKEHNKTEFIPALKTVIE |
| | SYHKTTNIELKNQLLKTILSTVTYYRHPDWKTNEIALIQVYFKI |
| 365 | MITTNKVAIYVRVSTTNQVEEGYSIDEQKDKLEAYCKIKDWKIYDVYVDGGFSGANTQRPELERLI |
| | SDVKRKKVDIVLVYKLDRLSRSQKDTLFLIEDVFAKNDVAFISLQENFDTSTPFGKASIGMLSVFAQ |
| | LEREQIKERMMLGKEGRAKNGKSMSWTTIAFGYDYSKETGVLSVNPTQALIVNRIFTEYLNGKPVV |
| | KIIRDLNAEGHVGRKRPWGETITKYLLKNETYLGKVKYKDKVYEGQHEPIITQELFDLVQLEVERR |
| | QISAYEKYNNPRPFRAKYMLSGLMKCGYCGASLGLRYTRKDKNGISHHKYQCRNRHSKDLEKRC |
| | ESGWYSKEELERGVIKELERIKFDPKYKNETLAKKEETIKVEEIKKQLERINNQVSKLTELYLDEIITR |
| | KELDEKNDKIKTERQFLEEQLENQKSNVLSIRKRKLTRLLKDFDVEKLSYEDASKIVKNIIKEIIVTK |
| | DGMSITLDF |
| 366 | MITTRKVAIYVRVSTTNQAEEGYSIQGQIDSLIKYCEAMGWIIYEEYTDAGFSGGKIDRPAMSKLITD |
| | AKHKRFDTILVYKLDRLSRSVRDTLYLVKDVFNQNNIHFVSLQENIDTSSAMGNLFLTLLSAIAEFE |
| | REQITERMTMGKIGRAKSGKTMAWTYTPFGYDYNKEKGELILDPAKAPIVKMIYTDYLKGMSIQKI |
| | VDKLNKMDYNGKDCTWFPHGVKHLLDNPVYYGMTRYNNKLFPGNHQPIITKELFDKTQRERQRR |
| | RLGIEENHYTIPFQAKYMLSKFLRCRQCGSRMGLELGRPRKKEGKRSKKYYCLNSRPKRTASCDTP |
| | LYDAETLEDYVLHEIAKIQKDPSIASRQKHIEDHELKYKRERIEANINKTVNQLSKLNNLYLNDLITL |
| | EDLKTQTNTLIAKKRLLENELDKTCDNDDELDRQETIADFLALPDVWTMDYEGQKYAVELLVQRV |
| | KVDRDNIDIHWTF |
| 367 | MKAIAIYARKSLFTGKGDSIGAQVDTCKRFIDYKFANEDYEIRTFKDEGWSGKTTDRPDFTNMVNL |
| | IKSKKIDYVITYKLDRIGRTARDLHNFLYELDNLGIVYLSATEPYDTTTSAGRFMISILAAMAQMERE |
| | RLAERVKSGMIQIAKKGRWLGGQCPLGFDSKREIYIDDMGKERQMMRLTPNKEEIKIVKLIYDKYL |
| | EMGSMSQVRKYCLENSIRGKNGGDFSTNTLKQLLTSPIYVKSSDNIFKYLESQNINVFGTPNGNGM |
| | LTFNKTKEIRIERDKSEWIAAVGKHKGIIDDNKWLQIQQQLQQQSEKQIKSSGRQGTTSTGLLSGIIK |
| | CSKCGNNLLIKTGHKSKKNPGTTYSYYVCGKKDNSYGHKCDNKNVRTDEADSAVITQLKLYNKEL |
| | LIKNLKEALIQNEKTDTDNIEILESKLKEKEKAVSNLVKKLSLIDDESISNIILNEVTNINKEINDIKLQ |
| | LSNETLKINEVTKATLDTEIYIKILENFNKKIDDITDPIEKMNLLKSALESVEWNGDSGEFKINLIGSK |
| | KK |
| 368 | MKVAIYVRVSTDEQAKEGFSIPAQRERLRAFCASQGWEIVQEYIEEGWSAKDLDRPQMQRLLKDIK |
| | KGNIDIVLVYRLDRLTRSVLDLYLLLQTFEKYNVAFRSATEVYDTSTAMGRLFITLVAALAQWERE |
| | NLAERVKFGIEQMIDEGKKPGGHSPYGYKFDKDFNCTIIEEEADVVRMIYRMYCDGYGYRSIADRL |
| | NELMVKPRIAKEWNHNSVRDILTNDIYIGTYRWGDKVVPNNHPPIISETLFKKAQKEKEKRGVDRK |
| | RVGKFLFTGLLQCGNCGGHKMQGHFDKREQKTYYRCTKCHRITNEKNILEPLLDEIQLLITSKEYF |
| | MSKFSDRYDQQEVVDVSALTKELEKIKRQKEKWYDLYMDDRNPIPKEELFAKINELNKKEEEIYSK |
| | LSEVEEDKEPVEEKYNRLSKMIDFKQQFEQANDFTKKELLFSIFEKIVIYREKGKLKKITLDYTLK |
| 369 | METMPQPLRALVGARVSVVQGPQKVSQQAQLETARKWAEAQGHEIVGTFEDLGVSASVRPDERP |
| | DLGKWLTDEGASKWDVIVWSKMDRAFRSTKHCVDFAQWAEERQKVVMFAEDNLRLDYRPGAA |
| | KGIDAMMAELFVYLGSFFAQLELNRFKSRAQDSHRVLRQTDRWASGLPPLGYKTVPHPSGKGFGL |
| | DTDEDTKAVLYDMAGKLLDGWSLIGIAKDLNDRGVLGSRSRARLAKGKPIDQAPWNVSTVKDAL |
| | TNLKTQGIKMTGKGKHAKPVLDDKGEQIVLAPPTFDWDTWKQIQDAVALREQAPRSRVHTKNPM |
| | LGIGICGKCGATLAQQHSRKKSDKSVVYRYYRCSRTPVNCDGVFIVADEADTLLEEAFLYEWADQ |
| | PVTRRVFVPGEDHTYELEQINETIARLRRESDAGLIVSDEDERIYLERMRSLITRRTKLEAMPRRSAG |
| | WVEETTGQTYGEAWETEDHQQLLKDAKVKFILYSNKPRNIEVVVPQDRVAVDLAI |
| 370 | MRNKVAIYVRVSTASQADEGYSIDEQKSKLEAYCEIKDWKIYDTYIDGGFSGANTQRPELERLISDA |
| | KRKKIDIVLVYKLDRLSRSQKDTLFLIEDVFAKNDVAFISLQENFDTSTPFGKASIGMLSVFAQLERE |
| | QIKERMMLGKEGRAKNGKSMSWTTIPFGYDYSKETGILSVNPTQALIVKRIFTEYLNGKSVVKIIRD |
| | LNAEGHVGRKRPWGETITKYLLKNETYLGKSKYKGKVFEGQHDAIISQELFDLVQLEVEKRQISAF |
| | EKYNNPRPFRAKYMLSGLMKCGYCGASLGLYVAPKNKNGVSKYKYQCRHRYHKDKAIRCNSGW |
| | YSKDELEKRVIKELERLKFDPKYKKETLAKKDETIKVEDIKKQLERINKQVSKLTELYLDEVITRKD |
| | LDEKNAKIKTERQYLEEQLENQKSNVMSIRKRKLSRLLKDFDIEKLSYEEASKIVKSVIKEIVVTKDD |
| | MTITLDF |
| 371 | MKVAIYTRVSTLEQREKGHSIDEQERKLRSFCDINDWTVKDVYVDAGFSGAKRDRPELTRLLDDIS |
| | EFDLVLVYKLDRLTRSVRDLLDLLEVFENNNVAFRSATEVYDTTTAIGRLFVTLVGAMAEWERETI |
| | RERSLMGKRAAIKKGMILTAPPFYYDRVNNTYIPNQYKDVVLDVYNKVKKGYSIAHIARLYNNSD |
| | VKPPNGNEEWTTRMLMHALRNPVTRGHYQWGEIYIEDSHEPIITDEMYNTIIDRLDKHTNTKVVAH |
| | TSVFRGKLICPNCGYALTLNSQKRKRKNDTIVYKTYYCNNCKITKGMKPHHITETETLRVFKDHLS |
| | KIDLKQYETQEKEKQSHVTIDLSKVMEQRKRYHKLYASGMMQENELFELIKETDEMIEEYEKQRK |
| | QVDVKEFDICKIKEIKDVLLKSWDIFTLEDKADFIQMSIKAINIEYTKLKRGKSSNSMKIKDIEFY |
| 372 | MITTNKVAIYVRVSTTNQVEEGYSIDEQKDKLSSYCDIKDWNVYKVYTDGGFSGSNTDRPALESLI |
| | KDAKKRKFDTVLVYKLDRLSRSQKDTLHLIEDVFIKNGIEFLSLQENFDTSTPFGKAMIGLLSVFAQ |
| | LEREQIKERMQLGKLGRAKSGKSMMWAKTSYGYDYHKETGTVTINPAQALTIKFIFESYLRGRSIT |
| | KLRDDLNEKYPKHVPWSYRAVRTILDNPVYCGFNQYKGEIYPGNHEPIISKEEYDKTQSELKIRQRT |
| | AAENVNPRPFQAKYILSGIAQCGYCGAPLKIMLGVKRKDGSRLKKYECHQRHPRTLRGVTTYNDN |
| | KKCDSGFYYKDKLEAYVLKEISKLQDDADYLDKIFSGDNAETIDRESYKKQIEELSKKLSRLNDLYI |
| | DDRITLEELQSKSAEFISMRGTLETELENDPALRKNKRKADMRKLLNAEKVFSMDYESQKVLVRRL |
| | INKVKVTAEDIVINWKI |
| 373 | MKLRAAIYVRVSTMEQAEEGYSISAQTEKLKSYANAKDYQVVKVFTDPGYSGAKLERPGLQNMIK |
| | SIESKEIDVVLVYKLDRLSRSQKNTLFLIEDVFLKNHVQFTSMQESFDTSTSFGRAMIGILSVFAQLE |
| | RDAITERMQMGAKERAKAGMWRGGPQSRLPFGYRYIDGVLLVDDYEAMIVKYMYTEFIKGTPLT |
| | KIQSKVAAKFPVKETLIYPSIMKNILQNNIYIGKIKYAGETYEGLHEHILDTETYDKAQQLWEHRNT |
| | NKKKYILSKYLLSGILYCGHCGGKMASTGAGLLKSGERVTDYICYSKKGTPSHMVVDRNCPSKRH |
| | RVNRLDPKIVELLKTITFEEMQKDNSFTDNTTTIKSEIESLDTKISKLLDLYQDGLVPIDVLNDRISKL |
| | NDDKELLQETLISQKKQIHPEEIAKNIQTAKDFDWANSDSAAKRAMVRALINKVELTNEDMKIEWN |
| | I |
| 374 | MKVATYVRVSTDEQAKEGFSIPAQRERLRAFCESQGWEIVEEYIEEGWSAKDLDRPQMQRLLKDIK |
| | KGNIDIVLVYRLDRLTRSVLDLYLLLQTFEKYNVAFRSATEVYDTSTAMGRLFITLVAALAQWERE |
| | NLAERVKFGIEQMIDEGKKPGGHSPYGYKFDKDFNCTIIEDEANTVRMIYRMYCDGYGYHSIAKRL |
| | NELGIKPRIAKEWNHNSVRDILTNDIYIGTYRWGNKVVLNNHPPIISETLFRKVQKEKEKRRVDRTR |
| | VGKFLLTGLLYCGNCNGHKMQGTFDKREQKTYYRCLKCNRITNEKNILEPLLDEIQLLITSKEYFMS |
| | KFSDQYDQKEEVDVSALKKELEKIKRQKEKWYDLYMDDRNPIPKEDLFAKINELNKKEEEIYNKL |
| | NEVEPEDKEPVEEKYNRLSKMIDFKQQFEQANDFTKKELLFSIFEKIVIYREKGKLKKITLDYTLK |
| 375 | MKYLALHENSRIAVYSRKSREDRDSEDTLAKHRNELEYLIKRENFKNVQWFEKVVSGETIDERPMF |
| | SLLLPRIENGEFDAVCAVAMDRLSRGSQIDSGRILEAFKQSGTLFITPKKTYDLSIEGDEMLSEFESII |
| | ARSEYRAIKRRTINGKKNATREGRLHSGSVPYGYKWDKNLKAAVVVEEKKKIYRMMIKWFLEEE |
| | YSCTVIAEMLNELKVPSPSGRSIWYGEVVSEILSNDFHRGYVWFGKYKKSKSNNSIVQNKNLDEVLI |
| | AKGHHETMKTDEEHALILNRIEKLRTYKVAGRRLNMNTHRLSGIVRCPYCHKAQAIEQPKGRRKH |
| | VRKCLRKSAERTKECEETKGIHEEVLFQSIMKEIKKYNESLFSPTEQDVNDDSYTAQLIGLREKAVK |
| | KAKGRIERIKEMYLDGDISKTEYKEKLKISQETLQKAENELAELIASTEFQNALSAETKKEKWSHHK |
| | VQEMIESTDGMSNSEINLILKMLISHVTYTVEDLGDGTKNLNIKVYYN |
| 376 | MKITLLYYIKKFNIYCNRYLSQQINISVDIIGFYQFKNVTNSVTDVLKRGDNLDRICIYLRKSRADEE |
| | LEKTIGVGETLSKHRKALLKFAKEKKLNIMEIKEEIVSADSIFFRPKMIELLKEVENNQYTGVLVMDI |
| | QRLGRGDTEDQGIIARIFKESHTKIITPMKTYDLDDDLDEDYILFESFMGRKEYKMIKKRMQGGRV |
| | RSVEDGNYIATNPPFGYDIHWINKSRTLKFNSKESEIVKLIFKLYTEGNGAGTISNYLNSLGYKTKFG |
| | NNFSNSSIIFILKNPVYIGKITWKKKDIRKSKDPHKVKDTRTRDKSEWIIADGKHEPIIDEKIWNKAQE |
| | ILNNKYHIPYKIANGPANPLAGVVICSKCNSKMVMRKYGKKLPHLICNNKECNNKSARFDYIEKAV |
| | LEGLDEYLKNYKVNVKANNKTSDIEPYEQQSNALNKELILLNEQKLKLFDFLEREIYTEEIFLERSK |
| | NLDERINTTTLAINKIKKILDNEKKKNNKNDIVKFEKILEGYKKTNDIQKKNELMKSLVFKIEYKKE |
| | QHQRNDGLLYIYFLSFCVRCISYLTQFISFFVYPYRILEIYLTFSFFIISYEH |
| 377 | MKVAIYTRVSSAEQANEGYSIHEQKKKLISYCEIHDWNEYKVFTDAGISGGSMKRPALQKLMKHL |
| | SSFDLVLVYKLDRLTRNVRDLLDMLEEFEQYNVSFKSATEVFDTTSAIGKLFITMVGAMAEWERET |
| | IRERSLFGSRAAVREGNYIREAPFCYDNIEGKLHPNEYAKVIDLIVSMFKKGISANEIARRLNSSKVH |
| | VPNKKSWNRNSLIRLMRSPVLRGHTKYGDMLIENTHEPVLSEHDYNAINNAISSKTHKSKVKHHAI |
| | FRGALVCPQCNRRLHLYAGTVKDRKGYKYDVRRYKCETCSKNKDVKNVSFNESEVENKFVNLLK |
| | SYELNKFHIRKVEPVKKIEYDIDKINKQKINYTRSWSLGYIEDDEYFELMEEINATKKMIEEQTTENK |
| | QSVSKEQIQSINNFILKGWEELTIKDKEELILSTVDKIEFNFIPKDKKHKTNTLDINNIHFKF |
| 378 | MSKKVAIYTRVSTTNQAEEGYSIDEQIDKLKMYCEAMDWKVSEIYTDAGFTGSKLTRPAMEKMIT |
| | DIGLKKFDTVIVYKLDRLSRSVRDTLYLVKDVFTKNEIDFISLSESIDTSSAMGSLFLTILSAINEFERE |
| | NIKERMTMGKIGRAKSGKSMMWAKTAFGYSHNQETGILEINPLEASIVEQIFNEYLKGTSITKLRDK |
| | LNEDGHIAKELPWSYRTIRQTLDNPVYCGYIKYKNNTFEGLHKPIISHETYLSVQKELEARQQQTYE |
| | KNNNPRPFQAKYLLSGIARCGYCGAPLRIVLGHRRKDGSRTMKYQCVNRFPRKTKGVTTYNDNKK |
| | CDSGAYDMQWIEDIVLKTLNGFQKSDKKLRKILNIKEESKVDTSGFQKQLKSINNKIQKNSDLYLN |
| | DFITMDDLKKRTEMLQGEKKLIQARINEVDKPSTSEIFDLVKSELGETTISKISYEDKKKIVNNLISKV |
| | DVTADNIDIIFKFQLA |
| 379 | MRTVRRIQPIKSPCKPRFKVAAYARVSDSRLHHSLSTQISYYNRLIQAHPDWELVGIYYDEGISGKE |
| | QSNRQGFLNLIKDCEDGKIDRIITKSIARFGRNTVELLTTVRQLRLKNIGVTFEKENIDSLSSEGELML |
| | TLLASVAQEESQNLSENIRWRIQKKFEKGIPHTPQDMYGYRWDGEQYQIEPNEAKVIRKVFKWYLD |
| | GDSVQQIVDKLNQEQVLTRLGNPFTVASIREFFKQEAYFGRLVLQKTYREAFSRNPKRNKGQRNKY |
| | IIENAHEPIVTKEYFDLVLHEKERRNQLMHQESHLNKGIFRDKISCSECGCLMIVKVDSKQVNKTVR |
| | YYCRTRNRFGASSCSCRTLGEKRLLASFKSKLGIVPDKEWVENNIKHIEYDFGYRILRVTPVKGRKY |
| | LIEIREGRY |
| 380 | MKGESELDKKAAIYIRVSTQEQATEGYSIQAQTDRLIKYVEAKDFILYKKYIDAGYSASKLERPAM |
| | QDLIQDVQSKKVDVVIVYKLDRLSRSQKDTMYLIEDIFRPNDVELISMQESFDTSTAFGSATVGMLS |
| | VFAQLERKSISERMITGRVERAKKGFYHTGGQDRPPAGYQFNSDNQLIINEYEAAAIKDLFRLYND |
| | GLGKSSISEYLKKNYPGKNKWLPSSIDRMLKNSLYIGKVKFSGAEYDGIHEPIIDEVTFYKTQKEIAR |
| | RKQTNTKRYNYVALLGGLCECGICGAKMANRRAVGRKGKVYRYYRCYSKKGSPKHMMKTDGCS |
| | SKAQQQFIIDEAVINNLKNIDVEAELKRRSAPQTNTSLISSQIESIDKQINKLIDLFQVDSMPLDVISEK |
| | IDKLNKEKQSMEKLLERKNKLDKTELQHRFDVLKSFDWDNSSIESKRVVIEMLVQKVIIHDNSIEIIL |
| | VE |
| 381 | MKRDLPSTFRGSRTPGEPWLGYIRVSTWREEKISPELQQSAIESWAARTGRRIVDWIVDLDATGRNF |
| | KRKIMGGIQRVEGREAVGIAVWKFSRFGRNDLGIAINLARLEQAGGDLASATEEVDARTAVGRFNR |
| | AILFDLAVFESDRAGEQWKETHAHRRALKLPATGRQRFGYVWHPRRVPDLTAPGGFRLQEERYER |
| | HPEFAPVAAELYERKLAGQGFSQLAYWLNDELLIPTTRGNRWGTNTVQRYLDSGFAAGLLRVHDP |
| | ECRCKLGQDHFSACKENRWLWLPGAQPALIVPEQWKEYGAHREQTRKTPPRARRASYPTSGIMRH |
| | GHCRGTAVARSGRDGKGGFVPGHVFVCFNRRNKGKSACEPGLYVRRDEVEAEVLKWLADTVAD |
| | DIDNAPALPAQRTAPGTAPDPRARLVEERTRTEAELAKIEGALDRLVTDYALDPDKYPADTFGRVR |
| | DQLLGKKGDIIKHLKSLSEVEVAPTREEFRPLIVGLLQEWDILHTTEKNAILRRLLRRLVIHNRKSDQ |
| | GAQWSVVRSFEFHPVWEPDPWS |
| 382 | MKRDLPSTFRGSRTPGEPWLGYIRVSTWREEKISPELQQSAIESWAARTGRRIVDWIVDLDATGRNF |
| | KRKIMGGIQRVEGREAVGIAVWKFSRFGRNDLGIAINLARLEQAGGDLASATEEVDARTAVGRFNR |
| | AILFDLAVFESDRAGEQWKETHAHRRALKLPATGRQRFGYVWHPRRVPDLTAPGGFRLQEERYER |
| | HPEFAPVAAELYERKLAGQGFSQLAYWLNDELLIPTTRGNRWGTNTVQRYLDSGFAAGLLRVHDP |
| | ECRCKLGQDHFSACKENRWLWLPGAQPALIVPEQWKEYGAHREQTRKTPPRARRASYPTSGIMRH |
| | GHCRGTAVARSGRDGKGGFVPGHVFVCFNRRNKGKSACEPGLYVRRDEVEAEVLKWLADTVAD |
| | DIDNAPALPAQRTAPGTAPDPRARLVEERTRTEAELAKIEGALDRLVTDYALDPDKYPADTFGRVR |
| | DQLLGKKGDIIKHLKSLSEVEVAPTREEFRPLIVGLLQEWDILHTTEKNAILRRLLRRLVIHNRKSDQ |
| | GAQWSVVRSFEFHPVWEPDPWS |
| 383 | MSVKVEGMVILAGGYDRQSAERENSSTASPATQRAANRGKAEALAKEYARDGVEVKWLGHFSEA |
| | PGTSAFTGVDRPEFNRILDMCRNREMNMIIVHYISRLSREEPLDIIPVVTELLRLGVTIVSVNEGTFRP |
| | GEMMDLIHLIMRLQASHDESKNKSVAVSNAKELAKRLGGHTGSTPYGFDTVEEMVPNPEDGGKL |
| | VAIRRLVPSAHTWEGAHGSEGAVIRWAWQEIKTHRDTPFKGGGAGSFHPGSLNGLCERLYRDKVP |
| | TRGTLVGKKRAGSDWDPGVLKRVLSDPRIAGYQADIAYKVRADGSRGGFSHYKIRRDPVTMEPLT |
| | LPGFEPYIPPAEWWELQEWLQGRGRGKGQYRGQSLLSAMDVLYCYGSGQLDPETGYSNGSTMAG |
| | NVREGDQAHKSSYACKCPRRVHDGSSCSITMHNLDPYIVGAIFARITAFDPADPDDLEGDTAALMY |
| | EAARRWGATHERPELKGQRSELMAQRADAVKALEELYEDKRNGGYRSAMGRRAFLEEEAALTLR |
| | MEGAEERLRQLDAADSPVLPIGEWLGDRGSDPTGPGSWWALAPLEDRRAFVRLFVDRIEVIKLPKG |
| | VQRPGRVPPIADRVRIHWAKPKVEEETEPETLNGFTAAA |
| 384 | MSARDYDIEAEWTPADLALLKELEEAEALLPADAPRALLSVRLSVFTDDTTSPVRQELDLRQLARE |
| | KGYRVVGLASDLNVSATKVPPWKRKSLGDWLNNRAPEFDALLFWKIDRFIRNLNDLNVMIRWSET |
| | YSKNLISKNDPIDLTTTMGKMMVSLLGGVAEIEAANTKTRVESLWDYTKTQGEWHVGKPPFGYKT |
| | GRDAAGKVVLVEDPPAVETLHTARELVMSGMSTTAAAKELKERGLISSTTATLTRRLRNPGILGLR |
| | VEEDKDGGIRRSKLILGRDGQPIRIADPIFTEEQFEELQAVLDKRGKRQPHRQPGGATSFLGVLKCA |
| | ECGTNMINHFTRNRHGDYAYLRCQGCKSGGCGAPNPQEVYDRLVEQVLAVLGDFPVEMREYARG |
| | EEKRKELKRLEESIAYYMKELEPGGRFTKTRFTQDQAEGTLDKLIAELEAIDPESAKDRWVYVAGG |
| | KTFREHWEEGGIDAMSADLIRAGIRCQVTRTKVPKVRAPQVHLKLMIPKDVRTRLVIRPDDFGQTF |
| 385 | MSARDYDIEAEWTPADLALLKELEEAEALLPADAPRALLSVRLSVFTDDTTSPVRQELDLRQLARE |
| | KGHRVVGLASDLNVSATKVPPWKRKSLGDWLNNRAPEFDALLFWKIDRFIRNLNDLNVMIRWSET |
| | YSKNLISKNDPIDLTTTMGKMMVSLLGGVAEIEAANTKTRVESLWDYTKTQGEWHVGKPPFGYRT |
| | GRDDSGKVVLVEDPLAVETLHTARELVMTGMSTTAAAKELKERGLISSTTATLTRRLRNPGILGLR |
| | VEEDKDGGIRRSKLILGRDGQPIRIADPIFTEEQFEELQAVLDKRGKRQPHRQPGGATSFLGVLKCA |
| | ECGTNMINHFTRNRHGDYAYLRCQGCKSGGYGAPNPQEVYDRLVEQVLAVLGDFPVEMREYARG |
| | EEKRKELKRLEESIAYYMKELEPGGRFTKTRFTQDQAEGTLDKLIAELEAIDPESAKDRWVYVAGG |
| | KTFREHWEEGGIDAMSADLIRAGIRCQVTRTKVPKVRAPQVHLKLMIPKDVRTRLVIRPDDFGQTF |
| 386 | MWACSHLRADGTTPTSSSTLLTMSARDYDIEAEWTPADLALLKELEEAEALLPADAPRALLSVRLS |
| | VFTDDTTSPVRQELDLRQLAREKGHRVVGLASDLNVSATKVPPWKRKSLGDWLNNRAPEFDALLF |
| | WKIDRFIRNLNDLNVMIRWSETYSKNLISKNDPIDLTTTMGKMMVSLLGGVAEIEAANTKTRVESL |
| | WDYTKTQGEWHVGKPPFGYKTARDEAGKVVLIEDPLAVETLHTARELVMSGMSTTAAAKVLKER |
| | GLISSTTATLTRRLRNPGVLGLRVEEDKDGGIRRSKLILGRDGQPIRIADPIFTEEQFEELQAVLDKRG |
| | KRQPHRQPGGATSFLGVLKCAECGTNMINHFTRNRHGDYAYLRCQGCKSGGYGAPNPQEVYDRL |
| | VEQVLTVLGDFPVEMREYARGEEKRKELKRLEESIAYYMKELEPGGRFTKTRFTQDQAEGTLDKLI |
| | AELEAIDPESAKDRWVYVAGGKTFREHWEEGGIDAMSADLIRAGIMCQVTRTKVPKVRAPQVHLK |
| | LMIPKDVRTRLVIRPDDFGQTF |
| 387 | MSDRASTYDIEAEWSPADLALLRSLEEAETLLPPDAPRALLSVRLSVFTEDTTSPVRQELDLRQLAR |
| | DKGMRVVGVASDLNVSATKVPPWKRKELGDWLGNKTPQFDALLFWKIDRFIRNMGDLSRMIEW |
| | ANRYEKNLISKNDPIDLKTPIGKMMTTLLGGVAEIESANTKARVESLWDYAKTQSDWLVGKPAYG |
| | YVTQRDESGKVSLAVDPKAREALHLARELVLGGMAARSVAEELKKREMVTPGLTAATLLRRMRN |
| | PALMGYRVEEDKRGGLRRSKLVLGHDGKPIRVADPVFTEEEFETLQAVLDSRGKNQPPRQPSGAT |
| | KFLGVLKCVDCRSNMIVHFTRNKHGEYAYLRCQKCKSGGLGAPHPQEVYDALVEQVLAVLGDFP |
| | VERREYARGEEARAEVKRLEESIAYYMQGLEPGGRYTKTRFTRENAERALDKLIAELEAVDPETTE |
| | DRWIYEPIGKTFRQHWEEGGMEAMALDLIRAGITCDVTRTKVPRVRAPQVELDLDIPSDVRERLVM |
| | RRDDFAEAF |
| 388 | MSKRAVIYTRVSRDDTGEGQSNQRQEAECRRLTDYRRLDVVAVEADISISASKGLERPAWLRVLG |
| | MIERGEVDYVIAYHMDRVTRSMTELEQLIEMCLKYDVGVATVSGDIDLTTDVGRMVARIIGAVAR |
| | AEVERKSARQKLANAQRAAEGKPHVSGIRPFGYADDHRQVVTIEAQAIRAAAEAALAGESMIGIAE |
| | SWSKDGLLSARARRGHDKGNRPTKAAWSARGVRNVLVNPRYAGIRLYNGERVGQGDWEPILDVE |
| | THLRLVEKLTDPTRRKGTVKTGRVAASLLTAIARCEVCGQTVRASSVRGRQTYACRNSHAHVDRS |
| | TADLMTQEWVISRLADPDTLAKLAPSGDDRVDEAKATIEKRREALKTYARLLATGAMDEDQFTEA |
| | SAVARSEMQEAEAVLTEAGTGDLLAGLDVGSDAVGPQFLALSLARQRGIVEALVDVTLRPASKAR |
| | KVVTPEHERVVLADR |
| 389 | MRVLGRIRLSRMMEESTSVERQREFIETWARQNDHEIVGWAEDLDVSGSVDPFDTQGLGPWLKEP |
| | KLREWDILCAWKLDRLARRAVPLHKLFGMCQDEQKVLVCVSDNIDLSTWVGRLVASVIAGVAEG |
| | ELEAIRERTLSSQRKLRELGRWAGGKPAYGFKAQEREDSAGYELVHDEHAANVMLGVIEKVLAGQ |
| | STESVARELNEAGELAPSDYIRARAGRKTRGTKWSNAQIRQLLKSKTLLGHVTHNGATVRDDDGIP |
| | IRKGPALISEEKFDQLQAALDARSFKVTNRSAKASPLLGVAICGLCGRPMHIRQHRRNGNLYRYYR |
| | CDSGSHSGGGGAAPEHPSNIIKADDLEALVEEHFLDEVGRFNVQEKVYVPASDHRAELDEAVRAV |
| | EELTQLLGTMTSATMKSRLMGQLTALDERIARLENLPSEEARWDYRATDQTYAEAWEEADTEGRR |
| | QLLIRSGITAEVKVTGGDRGVRGVLEFHLKVPEDVRERLSA |
| 390 | MRVLGRIRLSRVMEESTSVERQREIIETWARQNDHEIIGWAEDLDVSGSVDPIALTPALGPWLTDHR |
| | KHEWDILVAWKLDRLSRRAIPMNKLFGWVMENDKTLVCVSENLDLSTWIGRMIANVIAGVAEGE |
| | LEAIRERTKGSQKKLRELGRWGGGKPYYGYRAQEREDAAGWELVPDEHASAVLLSIIEKVLEGQS |
| | TESIARELNERGELSPSDYLRHRAGKPTRGGKWSNAHIRQQLRSKTLLGYSTHNGETIRDERGIAVR |
| | KGPALVSQDVFDRLQAALDSRSFKVTNRSAKASPLLGVLICRVCERPMHLRQHHNKKRGKTYRYY |
| | QCVGGVEKTHPANLTNADQMEQLVEESFLAELGDRKIQERVYIPAESHRAELDEAVRAVEEITPLL |
| | GTVTSDTMRKRLLDQLSALDARISELEKLPESEARWEYREGDETYAEAWNRGDAEARRQLLLKSG |
| | ITAAAEMKGREARVNPGVLHFDLRIPEDILERMSA |
| 391 | MRVLGRLRLSRSTEESTSIERQREIVTAWAESNGHTLVGWAEDVDVSGAIDPFDTPSLGPWLDERR |
| | GEWDILCAWKLDRLGRDAIRLNKLFGWCQEHGKTVASCSEGIDLSTPVGRLIANVIAFLAEGEREAI |
| | RERVTSSKQKLREVGRWGGGKPPFGYMGIPNPDGQGHILVVDPVAKPVVRRIVDDILDGKPLTRLC |
| | TELTEERYLTPAEYYATLKAGAPRQKAEPDETPAKWRPTALRNLLRSKALRGYAHHKGQTVRDLK |
| | GQPVRLAEPLVDADEWELLQETLDRVQANWSGRRVEGVSPLSGVVVCITCDRPLHHDRYLVKRPY |
| | GDYPYRYYRCRDRHGKNLPAEMVETLMEESFLARVGDYPVRERVWVQGDTNWADLKEAVAAY |
| | DELVQAAGRAKSATAKERLQRQLDALDERIAELESAPATEAHWEYRPTGGTYRDAWETADTDER |
| | REILRRSGIVLAVGVDGVDGRRSKHNPGALHFDFRVPEELTQRLGVS |
| 392 | MRTNEHNFHNIEEEIKHVAVYLRLSRGEDESELDNHKTRLLNRCELNNWSYELYKEIGSGSTIDDRP |
| | VMQKLLTDVEKNLYDAVLVVDLDRLSRGNGTDNDRILYSMKVSETLIVVESPYQVLDANNESDEE |
| | IILFKGFFARFEFKQINKRMREGKKLAQSRGQWVNSVTPYGYIVNKTTKKLTPSEEEAKVVIMIKDF |
| | FFEGKSTSDIAWELNKRKIKPRRATEWRSSSIANILQNEVYVGNIVYNKSVGNKKPSKSKTRVTTPY |
| | RRLPEEEWRRVYNAHQPLYSKEEFDRIKQYFECNVKSHKGSEVRTYALTGLCKTPDGKTMRVTQG |
| | KKGTDDDLYLFPKKNKHGDSSIYKGISYNVVYETLKEVILQVKDYLDSVLDQNENKDLVEELKEEL |
| | MKKEDELETIQKAKNRIVQGFLIGLYDEQDSIELKVEKEKEIDEKEKEIEAIKMKIDNAKTVNNSIKK |
| | TKIERLLSDVQSAESEKEINRFYKTLIKEIIVDRTDENEAKIKVNFL |
| 393 | MTNPASRPKAYSYIRMSSAIQIKGDSFRRQAEASAKYAAEHDLDLIDDYKLADLGVSAFKSDNLTT |
| | GALGRFVAECEAGEIEAGSFLLIESLDRLSRDKILDAFSLFARILKTGVKIVTLSDGQVYDGSSDQVG |
| | SIYYAISVMIRSNDESKIKSTRGLANWSQKRKLAAEHGVKMSSQCPAWLKLSVDRKSYLIDKERAK |
| | IVQRIFEASASGKGANLITKELNRDKVPTFGRGALWAEAFVSKTLRNRAVLGEFQPGQYVSGKRQP |
| | AGDPIPGYFPPVIEEELFDIVQASLRGRLLAGGRRGEGQSNIFTHVAFCGYCGSKMRHRSKGSRVKG |
| | NPPHRYLTCFNRFNGPGCDCKPLPYAAFERSFLTFVRDVDLRGLLEGAKRKSEAKTIADRITVNEEK |
| | VRKADERIRDYLIKIEGAPDLAEIFMERIRELKAEKDDLVRSIEESNDALSKIKSDNVTDEELASLIST |
| | FQNPCGENRIRLADRIKSIIERIDVYPNGEIRKDDPAIDLVRASGDPDAEKIIAAMNAGSRLKDDPYFI |
| | VTFRNGAVQTVVPNPSNPDDIRVSVYAGEKTRRVEGSAYEYESD |
| 394 | MDPQHKPTRALIVIRLSRLTDETTSPERQLEACERFCAARGWEVVGVAEDLDVSAGTTSPFERPSLS |
| | QWIGDGKDNPGRIGEFDTVVFYRVDRLVRRVRHLHDVIAWSERFDVNMVSATESHFDLSTTIGALI |
| | AQLVASFAEMELEGISQRATSAHRHNVQLGKFVGGSPPFGYMPEETPDGWRLVHDPDVVPIILEVV |
| | DRVLEGEPLRRITDDLNARGATTARDLVKQRKGKETEGHKWHSNVLKRRLMSPAMLGYALRREP |
| | LTDSKGKPKLSAKGAKLYGPEEIVRGPDGLPVQRAEPILPKPLFDRVVAELEARELQKEPTKRINSM |
| | LLRVLYCGVCGQPVYRAKGQGGRSDRYRCRSIQDGANCGNPSVLTYELDDLVEESILVLMGDSER |
| | LAHVWNPGEDNASELAEVEARLADRTGLIGVGAYKAGTPQRATLDTLIEADAKLYERLKAATPRP |
| | AGWTWEPTGETFAEWWAALDTGARNVYLRNMGVRVTYDKRPVPEQVSAGEKPRVHLELGEVRK |
| | MAEQVAVTGTIGTLTRNYTRLGEIGITHVDIDAGSGKAVFVTKSGERFELPLNIPEE |
| 395 | MNYERSYLRSCQVSTLEQKEHGYSIEEQERKLKSFCEINDWSVSDVFIDAGFSGAKRDRPELQRMM |
| | NDIKRFDLVLVYKLDRLTRNVRDLLDLLEVFEQNNVAFRSATEVYDTSTAMGRLFVTLVGAMAE |
| | WERETIRERVMMGKRAAIKQGMILTPPPFYYDRVDNTYIPNDYKKVVLWAYDEVMKGNSSKAIA |
| | RKLNDSDIPPPNGKRWEDRTITRALRNPITRGHYTWGDVFIENSHEPIITEEMYQQIKERLEERINTKI |
| | VSHVSVFRGKFICPRCGGTLTMNTATRKRKKGYVTYKTYYCNTCKTKKQSFGFSENEALRVFRDY |
| | LSKLDLDKYEVKTKQKDDVVTIDIDKIMEQRKRYHKLYAKGLMQEEELFELIKETDETIAEYEKQK |
| | ELVPRKSLDIDKIKKFKNALLESWKIFSLEDKADFIKMAIKSIDIDYVKLKNRHSIKINDIEFY |

TABLE 6

| SEQ | | SEQ | |
|---|---|---|---|
| ID | | ID | |
| NO: | attL | NO: | attR |
| 396 | TCTAACTCACGACACGTTGTACTCTTACC | 727 | CAGTTTTTATTTTATGCCTTAATTATACA |
| | AACCGCACTTGCGGTATGTCAATATGGCA | | CCGCACTTGCTCCCTCAAACGCTATAATC |
| | AAAAGCTATTC | | CCCATAGTT |
| 397 | CATTTTTACCTTGCTCTTCTCTCGAATTT | 728 | AGTTTTATTTTTGTCTGTATAGGCTGTCC |
| | CAGCATCTGCGGTATGCTTATAGGGACAA | | GCATCTGCATGGCGCATAACATATTTATG |
| | AAATTATAAA | | CGCTACAG |
| 398 | ACAATCAACAAAGATGTATGGTGGTACAT | 729 | TAACATATGTACGGAAGTATAGACACTCG |
| | GCATTAATATTTAATGTGTATACTTCCGT | | ATTAATATCGGATGTATACCGACTAAAAC |
| | ATTTTTATTT | | ATTAATTC |
| 399 | TACAGACTTACATGGGACCATTCTATAGC | 730 | TCAACTTTTAACCCTGTTTTAAGACCCAG |
| | AGCTTTAAAATACTTAGCAATAAAACAGG | | TATTAAGATGCGTGAGGGACAAGATTACC |
| | GGAATTGATA | | AGACTCAG |
| 400 | TGTAATTTCGGACACGAGTTCGACTCTCG | 731 | TTGTATATTGCTAACAAAAGTTTAGCCTC |
| | TCATCTCCACCATTTCTATCAATATACAT | | ATCTCCACCAAAATATCAATATCCAAGTC |
| | AGGAAATAGT | | TTTGAATT |
| 401 | ATATGTTCCCGCAAACAGCACACGTTGAG | 732 | TATCCCCTCCTCTCAAAACATGTAGAGAC |
| | ACGGTAGTATTGATGTCAAGGGTTGATAA | | TGTAGTACTTTTGCAGTTAAAAGATAAAT |
| | GTAAGCGTGT | | AAAGGACT |
| 402 | TCGGCTTAGTGATGCCGAGTTCAGCTGGT | 733 | TTTGCAATTGCTGGTGGTTCTGGTGCTTG |
| | AAACCTTGGGCGATTGCGAGGTTTAAGGC | | GCCTTGGGTACTTGCTTCTCAGCTACTTT |
| | TTTCCACTTTT | | CCCTCTTTT |
| 403 | GTCTTCTGGACCATGATGCGCCACTTCTG | 734 | TGTATCTTGATGTACAACATTGCTCTTTA |
| | AAATTTCAAATACAGATTAATGTTGTATA | | TTTTCAAAAAGATCAGTGGTCAAACGGCT |
| | AAGTAGCCCTG | | CATTAATTT |
| 404 | CGGGCAAATTGCTGCCATATGGACCGGAG | 735 | CTATTTATTAGATGTCTAAACAGTGCATT |
| | GCGGGACTCTACAACCTATATTAGACATC | | ACTACTTTAATTCCTTGGGCGCTTATTCC |
| | TTATAAAAAGT | | TGCCGCTGC |
| 405 | TGATTTGATTGTATTGGATATTATGTTAC | 736 | AATATAGTTGTATAAAAAGTCCTTTGCCA |
| | CAGATGGCGAAGGACTTTTTGTACAACAA | | GATGGCGAAGGTTATGATATTTGTAAAGA |
| | AAAGTCACAA | | AATAAGAA |
| 406 | GCCCGTGGATTTGTTTCCAATGACGCATC | 737 | CATAATATGGGTAAGACCTATCACCACAT |
| | ACGTGGAGTGTGTTGCTCTGCTCGTAAAA | | GTGGAGACGGTAGCACTTTTGTCCAAACT |
| | GCCTAGAAACC | | TGATGTCGA |
| 407 | GCTGGTGGTGGATATCGGCGGTGGTACGA | 738 | TCCATTAACTGTGGTGCACATCATAACAT |
| | CTGACTGTTCGTAGTCATGCAAGAATGTA | | AACTGTTCATTGCTGCTGATGGGGCCGCA |
| | ACCCGCAGTAA | | GTGGCGTTC |
| 408 | GGAGGCTAAAACCTTTTTTGCCTGATAAT | 739 | GGTGAAAATGTTGTAATAAGCGTCACACA |
| | CATACAAATGTGTTATGCTTATACAAACA | | CTCAAATAAGTGCCATTACAACAAATTGC |
| | AAAATTAGAAG | | AGGTGTATC |
| 409 | AGCTAAGTGTCCAAGCTGGCCCCCGATCC | 740 | TACATAATTTCGTATATTAGATATTACCA |
| | CAGTTTCAATTGGAAATACCTAATATACG | | GTTTCAATAGTTTGGGGAATCTTTGTAAG |
| | AAAAAAGGCG | | TGGGAGAC |
| 410 | ACAACAAAGACGCTAAGGTTTACGTGGTT | 741 | AATTAAACTAAGATATTTAGATACGCTAC |
| | AATGGAGACAAGAGTATCTAAATATCCTG | | TCGAGACAGTCGTCAAGATATTACAGGTT |
| | TTTTTTTCGC | | CATTTACA |
| 411 | CCCCAAAGTCGGCTTCGTCAGCCTTGGCT | 742 | GAAGTATAGGGTTTATTTCATTGGGGTGC |
| | GCCCGAAGGCCCTCTGAAGTAAACTCTTA | | CCGAAGGCCCTTGTTGATTCCGAGCGCAT |
| | TGACGCCCCG | | CCTCACCC |
| 412 | ATATCCCAAATGGAAAAGTTGTTAAACCG | 743 | AAAAATTTAGTTGGTTATTGGTTACTGTA |
| | TGTATAATCTTACGGTAACCAATAACCAA | | ACAAACGATACCAATCCCCCAACCTCCAA |
| | CTTTAAAACT | | GTGGATAT |
| 413 | AACGTTTGTAAAGGAGACTGATAATGGCA | 744 | ATGGATAAAAAAATACAGCGTTTTTCATG |
| | TGTACAACTATACTAGTTGTAGTGCCTAA | | TACAACTATACTCGTCGGTAAAAAGGCAT |
| | ATAATGCTTT | | CTTATGAT |
| 414 | GCCCAGGTGTGTCTGAGGTCATGGAAACG | 745 | CGCAGGTTCGAATCCTGCAGGGCGCGCCA |
| | GAAATCTTCAATTCCTGCACGACGACAAG | | TTTCTTCCTCATTTATGCCCGTCTTATCC |
| | CTGATAGCCAT | | GTTTCCGCT |
| 415 | TAACACCAATTAAGTGTTTAGTTCCCTCT | 746 | ATTTATAATTTTAGTTTCTCGTTTCTTCT |
| | TTGCGTCCAACGAGAGAAAACGAGGAACT | | TCTTCCCTCATAGCTTGATCCGAAAAAGT |
| | AAACAATCTAA | | TACAGCTGG |
| 416 | CTGAGTGGGCGAACTATTTATCTTTTACA | 747 | AATAATATTTTTATCCTTATTGACATATG |
| | ATGCCAATGCCATGTATAATTAGGGGATA | | AGGAAGCGGGTATAGCGGGAAGAAAGGAC |
| | AAAATAAAAA | | AAAATTTA |
| 417 | GAAACTATGGGGATTATAGCGTTTGAGGG | 748 | GAATAACTTTTTGCCGTATTGACATACCG |
| | AGCAAGTGCGGTGTATAATTAAGGCATAA | | CAAGTGCGGTTGGTAAGAGTAGCACGTGT |
| | AATAAAAAACG | | CGTGAATTA |
| 418 | CCGTCCCGCGACGGACCGAACCCAGTCGT | 749 | TATTGGTTAGGTGTCCTAGATCAACCTAC |
| | TGAGCCCGCTGTAAATCGGTCTATGACAT | | AGTCCCTTGTTCTCGTGAATCACCAATAC |
| | CTAACTAATA | | CGTGCCCC |
| 419 | AGACTCAAAAACTGCAACCTTAAAGCTTT | 750 | CTTCTTATTTAAACTAAGATATTTAGATA |
| | CACATTGCTTGAGATAAGAGTATCTAAAA | | CATTGCTTGAAAGCTTATTAACGCTATCA |
| | TTCACACTTTT | | GTAACAAGT |
| 420 | GACGACGTCAAATGAGAAATCTGTTACAC | 751 | TTTTTACAAAGAGGTATTTAGATACATGA |
| | GTGTAACAATGCCTGTATCTAAATACCTC | | GCTACATTAGCAGTTAACCGCCGTTTTAA |
| | TAAAGAAAGAC | | ATCGCAAAA |
| 421 | GTTAACAAGCACTTTAGACGGAATACAGC | 752 | ACATAAATATATGGAAGTATACACACTAT |
| | CATGGTTGGTTAATTGTGCATACTTCCAT | | ACATTTATGCATGTACCGCCATAGCTTTC |
| | AAAATATTAA | | TGTAAACT |
| 422 | AGAACTGCGCTTTTTACAACAAGAGCATT | 753 | TTTAGATTTTTCGTATTTACGATAACTTT |
| | TTGTTTGTGTAAACATAACATAAATACTA | | ACATGTTTATATTTAAATACAAAAAATCA |
| | ATAAAATGTTA | | AGTTATATA |
| 423 | TATAGGCTGACATAAGTGTACTGTGGCGA | 754 | TTTTCACTTCGTGTACATGGTGGAGTATT |
| | TTGTACTGGTTTAACTCTCTACCATGTAC | | AAACTGATTCACTTCCCCATACCCAAACA |
| | ACTTTTTTTC | | TATTACAC |
| 424 | TAAGGATAAGAAGGTTAAAGCATTTACAC | 755 | TCTGAATATCAATAATTTTAGTAACCTTG |
| | TTTTAGAAATCAAGGATAGTAAATTTCTT | | ATTGAGAGCCTTATTGTATTATCAGTAGT |
| | TATATTTTCC | | GGCATTTA |
| 425 | ATTCCAACCATCACCAAGAACATCTTTAC | 756 | AGATGCTCTCCCAGCTGAGCTAAACTCCC |
| | TTCCAAGTTCGATACCATTTGAAAACACA | | TAGAGCTAAGCGACTTCCCTATCTCACAG |
| | GGAGAACGAG | | GGGGCAAC |
| 426 | TCTGGCGGCAGTGCATTTCAAACACCATG | 757 | TGTGCTCTTTTATTGTAGTTATATAGTGT |
| | GTTTGGTCAATTAAACACAACCTAACTAC | | TTGGTCAATTGATGACTGGGCCACAGCTT |
| | ATTAAATAAA | | TTAGCTCA |
| 427 | TCCTAAGGGCTAATTGCAGGTTCGATTCC | 758 | AATCCCCTGCCGCTTCAAGTAGATGTCTG |
| | TGCAGGGGACACCATTTATCAGTTCGCTC | | CAGGGGACACCAGATACCCTTCAAACGAA |
| | CCATCCGTACC | | ATCTACCTT |
| 428 | AAATAGAAAAATGAATCCGTTGAAGCCTG | 759 | TAATGATTTTTAATGTTTCACGTTCAGCT |
| | CTTTTTTATACTAAGTTGGCATTATAAAA | | TTTTTATACTAACTTGAGCGAAACGGGAA |
| | AAGCATTGCTT | | GGTAAAAAG |
| 429 | GACGAAATAGATATTTTTTGTGGCCATTA | 760 | GATTTATGCTTTGTCGTCACCTTGTTGGT |
| | AGCGCATGAGGTTGTTACCAACAGGGTGA | | GTAATTAGATTTACCCCATTTAATCCTAA |
| | TAACAAAGCT | | AGCATCAT |
| 430 | AACGAAGTAGATGTTTTTTGTTGCCATTA | 761 | CGTTTATGCATTGTTGTCACCTTGTTGGT |
| | GGCGCATGAGGTTGACGACAACATGGTAG | | GTAATTAGATTTACCCCATTTAATCCTAA |
| | CGACAATATA | | TGCATCAT |
| 431 | AATATTAATAAGTTATATTGGGGGAACGT | 762 | TTTTTTTACGTGAATGTTTTGTAACAACT |
| | GTGCGGTCTACCGCGTAACACACCATTCA | | ACAGTAGAAGTGGTACCATTCATGTCCTT |
| | TCAAAATTTA | | ACGAGATA |
| 432 | ATCGCTGTAGCGCATAAATACGTTATGAG | 763 | GGTTTATAATTTTTGTCCCTATAAGCATA |
| | ACACGCAGATGCCGACAGACTATATAGAC | | CCGCAGATGCTGAAATTCGAGAAAAGAGC |
| | AAAAATAAAAC | | AAAGTAAAG |
| 433 | CATCTTTACTTTGCTCTTTTCTCGAATTT | 764 | AGTTTTATTTTTGTCTATATTGGCTGTCG |
| | CAGCATCTGCGGTATGCTTATAGGGACAA | | GCATCTGCGTGTCTCATAACGTATTTATG |
| | AAATTATAAAC | | CGCTACAGC |
| 434 | ATCCCATGATGAGCCGAGATGACATAACC | 765 | GTGGAAAATATAAAGAATTTTACTATCCT |
| | CACCATTTCAATTAAAGATACTAAATCTC | | ACATTTCATTGAATGTCATTCTCTCACCT |
| | TTGATTTTTGA | | TTATCAACC |
| 435 | TCAAAAGTTAAGGGTTAAAGCATTTACGC | 766 | CCTATTGAATGAGAGTTTTAGATACGCTT |
| | TTTTAGAATGTTTGGTATCTAAAACTCAC | | TTAGAATGTTTGGTAGCATTGGTTACAAT |
| | GCTTTTTTGA | | CACAGGAG |
| 436 | GTTACTATAGCTCAGATGATTAAGGGACA | 767 | AAACCATCAACAATTTTCCTCTGAGTGTC |
| | CAGCCTACTTCCCGTTTTTCCCGATTTGG | | ATTTAGGCTGTGTCCCTTAATTACGTAAG |
| | CTACATGACA | | CGTTGATA |
| 437 | GAATGATGCGTTGGGGCTTAATGGAGTAA | 768 | TCTTTTGTCATCACCCTGTTGGCGTCAAC |
| | ATCTAATTACACCAACAAGGTGACGACAA | | CTAATGCGCCTAATGGCTACAAAAGACAT |
| | AGCATAAACG | | CTACTTCG |
| 438 | GGATCAAAAAGAACGACGATTCTTTAGTG | 769 | TTTTCTTTTGTATCAAAATCAGTAGGAAC |
| | TTTTTGAAATAATCTTACTGAGTTTAATA | | ATAGATCCAACCATGGGTTCAGGTTCATT |
| | CAATGCCGTG | | GATGTTAA |
| 439 | GGAAATTAATGAGCCGTTTGACCACTGAT | 770 | CAGGGTTACTTTATACAACATTAATCTGT |
| | CTTTTTGAAAATAAAGAGCAATGTTGTAC | | ATTTGAAATTTCAGAAGTGGCGCATCATG |
| | ATCAAGATGCA | | GTCCAGAAG |
| 440 | GTCTTCTGGACCATGATGCGCCACTTCCG | 771 | TGTATCTTGATGTACAACATTGCTCTTTA |
| | AAATTTCAAATACAGAATAATGTTGCATA | | TTTTCAAAAAGATCAGTGGTCAAACGGCT |
| | TAATATTACTA | | CATTAATTT |
| 441 | GTCTTCTGGACCATGATGCGCCACTTCCG | 772 | TGTATCTTGATGTACAACATTGCTCTTTA |
| | AAATTTCAAATACAGAATAATGTTGCATA | | TTTTCAAAAAGATCAGTGGTCAAACGGCT |
| | TAATATCACTA | | CATTAATTT |
| 442 | GTCTTCTGGACCATGATGCGCCACTTCCG | 773 | TGTATCTTGATGTACAACATTGCTCTTTA |
| | AAATTTCAAATACAGATTAATGTTGTATA | | TTTTCAAAAAGATCAGTGGTCAAACGGCT |
| | AAGTAACCCTG | | CATTAATTT |
| 443 | GTCTTCTGGACCATGATGCGCCACTTCCG | 774 | TGTATCTTGATGTACAACATTACTCTTTA |
| | AAATTTCAAATACAGAATAATGTTGCATA | | TTTTCAAAAAGATCAGTGGTCAAACGGCT |
| | TAATATTACTA | | CATTAATTT |
| 444 | ACAATCAACAAAGATGTATGGCGGTACAT | 775 | TGATATAAGTACGGAAGTATAGACACTCG |
| | GCATTAATATTTAATGTGTATACTTCCGT | | ATTAATATCGGATGTATACCGACTAAAAC |
| | ATTATTGTTT | | ATTAATTC |
| 445 | ATGAATTAATGTTTTAGTCGGTATACATC | 776 | CTATAAAAATACGGAAGTATACACATTAA |
| | CGATATTAATCAAGTGTCTATACTTCCGT | | ATATTAATGCATGTACCGCCATACATCTT |
| | ACATAAGTTA | | TGTTGATT |
| 446 | ACAATCAACAAAGATGTATGGTGGTACAT | 777 | TAACATATGTACGGAAGTATAGACACTTG |
| | GCATTAATATTTAATGTGTATACTTCCGT | | ATTAATATCGGATGTATACCTACTAAAAC |
| | ATTTTTGTTT | | ATTAATTC |
| 447 | CTGTTTCAACAAATGATGCTCTTGGCCTT | 778 | AAATACATATTCTCTTGTTGTCATCATGT |
| | AATGGTGTAAACCTAATTACACCAAGAGG | | TGGTGTAAACCTTATGCGTTTAATGGCGA |
| | ATGACGACAAA | | CAAAACATA |
| 448 | AGAAAAAGTGAATGTATTCACTGTTGGCT | 779 | ATAATATAAAATACTGTTGTTCTATATGG |
| | GGATTGGAGTTGCAACACAACTACAAATG | | ATTGGAGTTGCATGCACTCACCCTCCTAT |
| | CAGTATAAAGG | | GCTAAGTGT |
| 449 | ATACGATTTCGGACAGGGGTTCGACTCCC | 780 | AGCAGGGCGATCCTGAGTTTAATCTGGCT |
| | CTCGCCTCCACCAGCAAAGGTCACAATCG | | CGCCTCCACCATTCAAATGAGCAAGTCGT |
| | TGTCGATGTCA | | AAAAACATA |
| 450 | AACCAGCTGTAACTTTTTCGGATCAAGCT | 781 | TTAGATTGTTTAGTTCCTCGTTTCCTCTC |
| | ATGAGGGAAGAAGAATAAACGAGATACCA | | GTTGGACGCAAAGAGGGAACTAAACACTT |
| | AAAAAGAACAT | | AATTGGTGT |
| 451 | TATGCAACCCGTCGATATGTTCCCGCAAA | 782 | ATAGTAGGAAGATACAGAGTGTACTCTCA |
| | CAGCTCACATCGAGTGTGTAGGACTGCTT | | ACGCACGTGGAAACCGTAGTACTCTTGCA |
| | ACACGTGTGGA | | GTTAAAAGA |
| 452 | TATCTTTTAACTGCAAGAGTACTACGGTT | 783 | TCCACACGTGTAAGCAGTCCTACACACTC |
| | TCCACGTGCGTTGAGAGTACACTCTGTAT | | GATGTGAGCTGTTTGCGGGAACATATCGA |
| | CTTCCTACTAT | | CGGGTTGCA |
| 453 | AACCAGCTGTAACTTTTTCGGATCGAGTT | 784 | TTAGATTATTTAGTACCTCGTTATCTCTC |
| | ATGATGGAAGAAGAAGAAACGAGAAACTA | | GCTGGACGTAAAGAGGGAACAAAGCATCT |
| | AAATTATAAAT | | AATAGGTGT |
| 454 | TTTTCCCCGAAAATCTTTAACACCGCTAT | 785 | TATTTTGGTAGTTTATAGAAGTAATTTCA |
| | CCGTTGATGTTCACTCCATTAATTACCAA | | GTTGATGTCCCAGCTCCTCCAAAGAAAAC |
| | AATTTAAAAA | | TAAATATT |
| 455 | GGATCAGAAGGTTAGGGGTTCGACTCCTC | 786 | AAATTTGTTAGGGTAAAAAAGTCATAGTT |
| | TTGGGTGCGCCATCGATTAACCCTAACTG | | GGGTGCGCCATTTAAAAATAATAATAAGA |
| | ATAAATAAAAA | | CTGTAGCCT |
| 456 | TTTTCCCCCGAAAATCTTTAACACCACTA | 787 | TTATTTTGGTAGTTTATAGAAGTAATTTC |
| | TCTGTTGATATTCACTCCATTAATTACCA | | AGTTGATGTCCCAGCTCCTCCAAAGAAAA |
| | AAAAAACAGG | | CTAAATAT |
| 457 | GTAAACTAAAATATGCCCAGACCCCATTG | 788 | TATGGAATTGTATCAATCTCGGCGTGGTT |
| | CGTTATCCGTTGCCACTCTGAAATTGATA | | TTGTCGATAATTTTTAGTTCTTCTGGTTT |
| | CAATGTAACA | | TAAATTAC |
| 458 | GTAAACTAAAATATGCCCAGACCCCATTG | 789 | TATGGAATTGTATCAATCTCGGCGTGGTT |
| | CGTTATCCGTTGCCACTCTGAAATTGATA | | TTGTCGATAATTTTTAGTTCTTCTGGTTT |
| | CAATGTAACA | | TAAATTAC |
| 459 | CTTGTGGATCACCTGGTTTTTCGTGTTCA | 790 | TGTCTCTTTTTATTAGGGTTTATATCAAC |
| | GATACACACATGTAAAGTAGACATAAACA | | TACACACATACGAAGTGCTCCTGAGAGAG |
| | GCAAAAATTTG | | AAAGCGCAT |
| 460 | GAAGGCAGACCATTAACAGGAAGGGATGG | 791 | TAAAGATCGTAAAAAAGAAATAGAGTTCC |
| | AGCATTTACACCATTTATAAAAAAGCTGC | | GAATTGACCTTACCCAGAAAAAGTGGAGA |
| | TGGAGGCAAG | | GAAAGAAA |
| 461 | GGAAATTAATGAGCCGTTTGACCACTGAT | 792 | TAGTAATATTATATGCAACATTATTCTGT |
| | CTTTTTGAAAATAAAGAGCAATGTTGTAC | | ATTTGAAATTTCGGAAGTGGCGCATCATG |
| | ATCAAGATACA | | GTCCAGAAG |
| 462 | GTCTTCTGGACCATGATGCGCCACTTCCG | 793 | TGTGTCTTGATGTACAACATTACTCTTTA |
| | AAATTTCAAATACAGAATAATGTTGCATA | | TTTTCAAAAAGATCAGTGGTCAAACGGCT |
| | TAATATTACTA | | CATTAATTT |
| 463 | GCTTCTGCTTGGATTTTACGCCATCCAGC | 794 | TTCATTATTTTAATAGAGATAGAAATCAA |
| | CAATATGCACATGGTAGCATGAGTGTTCT | | CCATGCAAGTGATCGCCGGTACGATGAAC |
| | ATGAAAAAAGA | | GTAGGGCGA |
| 464 | GTCTTCTGGACCATGATGCGCCACTTCCG | 795 | TGTATCTTGATGTACAACATTACTCTTTA |
| | AAATTTCAAATACAGAATAATGTTGCATA | | TTTTCAAAAAGATCAGTGGTCAAACGGCT |
| | TAATATTACTA | | CATTAATTT |
| 465 | AGCTTTTATTGCAAGAAAAATGGGTTATA | 796 | TATTTATATAAAATAGTGTTTTTGTAAAG |
| | AGTACACATCACCATATTTGACAAAAAAC | | TACACATCAGGTTATAGTAATATCGAAAA |
| | CTATAAATAA | | AGGAAGCG |
| 466 | AACCAGCTGTAACTTTTTCGGATCGAGTT | 797 | TTAGATTGTTTAGTATCTCGTTATCTCTC |
| | ATGATGGAGGGAGAAGAAACGGGATACCA | | GTTGGACGTAAAGAGGGAACAAAGCATCT |
| | AAAATAAAGAC | | AATAGGTGT |
| 467 | ACGTTTGTAAAGGAGACTGATAATGGCAT | 798 | TGGATAAAAAAATACAGCGTTTTTCATGT |
| | GTACAACTATACTCGTTGTAGTGCCTAAA | | ACAACTATACTCGTCGGTAAAAAGGCATC |
| | TAATGCTTTTA | | TTATGATGG |
| 468 | ACAATCATCAGATAACTATGGCGGCACGT | 799 | TTAATAAACTATGGAAGTATGTACAGTCT |
| | GCATTAATGTTGAGTGAACAAACTTCCAT | | TGCAACCACGGTTGTATCCCGTCTAAAGT |
| | AATAAAATAA | | ACTCGTAC |
| 469 | AACAATCTGCAAACATGTATGGCGGTACA | 800 | TTAATTTTTGTACGGAAGTAGATACTATC |
| | TGTATCAATATCCATGTTACTTAGTGCCA | | TTTCAACATTGGTTGTATTCCTACAAAGA |
| | TACAAAAACC | | CACTCATT |
| 470 | ACAGCCTGTGGATATGTTTGCACAGACTG | 801 | GTCTTTTTACCTTATATAACAGTTTCATG |
| | CTCACGTGGAGACGGTAGTATTGATGTCA | | CACGTGGAGTGTGTAGTTAAGCTAATCAA |
| | CGAAAAGAAAA | | GGTAAATCA |
| 471 | CGAGACGAGAAACGTTCCGTCCGTCTGGG | 802 | TGTTATAAACCTGTGTGAGAGTTAAGTTT |
| | TCAGTTGCCTAACCTTAACTTTTACGCAG | | ACATGGGCAAAGTTGATGACCGGGTCGTC |
| | GTTCAGCTTA | | CGTTCCTT |
| 472 | ATTCTCCTTTAACGAATGAAGCGACTAAT | 803 | TTGACTTTTGACATCAATACTACGCACTC |
| | TCGATATGGCTTGAGAGGACAGAATGAAT | | CACATGATGGGTTTGCGGGAAAAGATCTA |
| | GTCATTTGAGT | | CAGGCTGAA |
| 473 | CAGCCGGCTGATTTATTTCCAAATACGCA | 804 | TCCATAATATGGGTAAGACCTATCACCAC |
| | TCACGTGGAGTGTGTTGCTCTGCTTGTAA | | ACGTGGAGTGCGTAGTGTTGCTACAACGA |
| | AAGCTTAGAAA | | AGCAACGGG |
| 474 | TATGCAACCCGTCGATATGTTCCCGCAAA | 805 | ATAGTAGGAAGATACAGAGTGTACTCTCA |
| | CAGCTCACATCGAGTGTGTAGGACTGCTT | | ACGCACGTGGAAACCGTAGTACTCTTGCA |
| | ACACGTGTGGA | | GTTAAAAGA |
| 475 | AACAGAAGAAGGGAAGTTCTACCTATTGA | 806 | CCGAAGCATCGTATCAATGCTTCGGTCAA |
| | TACCTTTGGCAAAGGGCACGAGTTTGATA | | TGTTTGGTGGAGCTGAGGAGACGATATCT |
| | CAAAATGCACC | | AGAACCGAT |
| 476 | AACAGAAGAAGGGAAGTTCTACCTATTGA | 807 | CCGAAGCATCGTATCAATGCTTCGGTCAA |
| | TACCTTTGGCAAAGGGCACGAGTTTGATA | | TGTTTGGTGGAGCTGAGGAGACGATATCT |
| | CAAAATGCACC | | AGAACCGAT |
| 477 | AACAGAAGAAGGGAAGTTCTACCTATTGA | 808 | CCGAAGCATCGTATCAATGCTTCGGTCAA |
| | TACCTTTGGCAAAGGGCACGAGTTTGATA | | TGTTTGGTGGAGCTGAGGAGACGATATCT |
| | CAAAATGCACC | | AGAACCGAT |
| 478 | GTCTCGCTCGCCCACCGCGGGGTGCTCTT | 809 | GTAGCCACTTGTTTTACACGTCTTGTCTC |
| | TCTGGACGAGGCATGTAAAACAGGTGGGC | | TGGACGAGGCCCCGGAGTTCTCGGGGAAG |
| | TTGATCAGCTA | | GCGCTGGAC |
| 479 | CACTACAGTATGCAGATTTTGCAGCTTGG | 810 | TATGATAATTTTAGTATTCATGATTGGTT |
| | CAGCGTGAATAGCCCGTTATGAATACTAA | | GTTTGAATGGCTACAAGGTGAGGCGTTAG |
| | AAATTCCACTC | | AGCAACAGC |
| 480 | TCATCACTACTTAATATATCCATAAGAGA | 811 | ACCCTTAAACATATAACATGTTTAAGGGT |
| | AATTTCATTACCCACTTCATGTTGTATGT | | ATTCATTTCCTTCTTTGTCTACTCCTATA |
| | TATGTAAAAA | | GGATCTTG |
| 481 | TCTGGTGGCAGTGCATTTCAAACACCGTG | 812 | TGTGCTCTTTTGTTGTATTTATATGGCGT |
| | GTTTGGTCAATTAAACACAACCTAACTAC | | TTGGTCAATTGATGACTGGGCCACAGCTT |
| | ATCAAATGAA | | TTAGCTCA |
| 482 | GTTTTTTGTAGCCATTAGGCGCATGAGGT | 813 | GTCGTCACCTTGTTGGTGTAATTAGATTA |
| | TTACGCCAACAGGGTGATAACAAAAGAAG | | ACCCCATTAAGCCCTAAAGCGTCATTCGT |
| | GATTTTTTAAT | | CGAAACAGC |
| 483 | GATCACCCAGGACGTCTGCGCCTTCTACG | 814 | CCTGTATTGTGCTACTTAGAGCATAAGGC |
| | AGGACCATGCCTTACAAGCTCAAAATAGC | | GACCATGCCCTCTACGACGCCTACACGGG |
| | ACACGTTTCCG | | CGTGGTGGT |
| 484 | GCAACCGGCATCAGTGTAATACCGATAAT | 815 | CAAATAATGTAGTACCCAAATTAAGTTTC |
| | CGTAACAAGCAACCTTAATCGGGTACTAC | | ACACAACAGAGCCTGTCACGACCGGCGGA |
| | TTAATATCTA | | AAAAACGA |
| 485 | GTGAGGATGCGCTCGGAGTCGACCAGCGC | 816 | TCTGAGAATTAGTATATTTTCCTATTCGC |
| | CTTGGGGCACCCTAACGAAACCCATCCTA | | AGGGGCATCCAAGACTGACGAAGCCGACT |
| | TACTAGGGGC | | TTGGGAGT |
| 486 | ACAAGACCCCATCGGAACAGATAAAGAAG | 817 | ATACCAATAACATATAAAGAGTAGTGTGT |
| | GTAATGAAATAAACACTACTATTTATATG | | AATGAAATAAGTCTTTTAGATATACTTGG |
| | TTATTTTCTA | | CACAGAGG |
| 487 | GCTGGTGGTGGATATCGGCGGTGGTACGA | 818 | TCCATTAACTGTGGTGTACATCATAACAT |
| | CTGACTGTTCGTAGTCATGCAAGAATGTA | | AACTGTTCATTGCTGCTGATGGGGCCGCA |
| | CACCGCAGTAA | | GTGGCGTTC |
| 488 | CCATCATAAGATGCCTTTTTACCGACGAG | 819 | AAAGCATTATTTAGGCACTACAACTAGTA |
| | TATAGTTGTACATGAAAAACGCTGTATTT | | TAGTTGTACATGCCATTATCAGTCTCCTT |
| | TTTTATCCAT | | TACAAACG |
| 489 | CCACTCCCAAAGTCGGCTTCGTCAGTCTT | 820 | GCCCCTAGTATAGGATGGGTTTCGTTAGG |
| | GGATGCCCCTACGAATAGAAAAATATACT | | GTGCCCCAAGGCGCTGGTCGACTCCGAGC |
| | AATTCTCAGG | | GCATCCTC |
| 490 | CACTCCCAAAGTCGGCTTCGTCAGTCTTG | 821 | CCCCCAGTGTAGGATTTATATCACTAGGT |
| | GATGCCCCAACGAATAGAAAAGTAAACTA | | TGCCCCAAGGCGCTGGTCGACTCCGAGCG |
| | GCTTTCAGCG | | CATCCTCA |
| 491 | ACCAGCTGTAACTTTTTCGGATCAAGCTA | 822 | TAGATTGTTTAGTATCTCATTATCTCTCG |
| | TGAGGGACGGAGACGAATCGAGAAACTAA | | TTGGACGCAAAGAGGGAACTAAACACTTA |
| | AATTATAAATA | | ATTGGTGTT |
| 492 | AGTTCAGCCCGTGGATTTGTTTCCAATGA | 823 | TCGTTCCATAATATGGGTAAGACCTATCA |
| | CGCATCACATCGAGTGTGTGGTTCTGCTC | | CCACATGTGGAGTGCATAGCGTTGATACA |
| | GTAAAAGCCT | | AAGAGTGA |
| 493 | AGAAATCACTCAGCAAGAGTTAGCCAGGC | 824 | CCCCCTCGTGTTATTGTGGGTACATGATA |
| | GAATTGGCAACCCGAATGTAGTCAACCCA | | TTTGGCAAACCTAAACAGGAGATTACTCG |
| | AAATAACTAAA | | CCTATTTAA |
| 494 | CAGCCGACTGATTTGTTTCCGAATACGCA | 825 | ATATGACATCAATGCCATCAACTCGAGCC |
| | TCACGTGGAGTGTGTGGTTCTGCTCGTAA | | ACGTGGAGTGCGTAGTGTTGCTACAACGA |
| | AAGCCTAGAAA | | AGCAACGGG |
| 495 | GTCTTCTGGACCATGATGCGCCACTTCTG | 826 | TGTATCTTGATGTACAACATTGCTCTTTA |
| | AAATTTCAAATACAGATTAATGTTGTATA | | TTTTCAAAAAGATCAGTGGTCAAACGGCT |
| | AAGTAGCCCTG | | CATTAATTT |
| 496 | TGATTTGATTGTATTGGATATTATGTTAC | 827 | AATATAGTTGTATAAAAAGTCCTTTGCCA |
| | CAGATGGCGAAGGACTTTTTGTACAACAA | | GATGGCGAAGGTTATGATATTTGTAAAGA |
| | AAAGTCACAA | | AATAAGAA |
| 497 | AAAATGTGTAGACATGTTTCCTTATACGA | 828 | CGAAAGACATCAATACTGTCCTCTCGAGC |
| | CACATGTTGAGTGCGTCACATTGATGTCA | | CATGTTGAGACGGTAGTGTTAATGGAGAG |
| | AGGGTTTAGAA | | AAAGTAAGA |
| 498 | AATAACAAACTATTTTTTATAGAAACATG | 829 | AAAGAAAAAATTCTTTATTTCTACATACG |
| | GGGATGTCCGTATGTAGAAAATAGTAGGA | | GTTGTCAGATGAATGAAGAGGATTCCGAA |
| | ATATATGAGA | | AAATTATC |
| 499 | TAACACCAATTAAGTGTTTAGTTCCCTCT | 830 | CTTTATTTTTTTTGTATCCCATTTCCTCT |
| | TTGCGTCCAACGAGAGGAAATGAGGCACT | | CCCTCCCTCATAGCTTGATCCGAAAAAGT |
| | AAACCAGTTGA | | TACAGCTGG |
| 500 | TAACACCAATTAAGTGTTTAGTTCCCTCT | 831 | TGTTCTTTTTTTGGTATCTCGTTTCTTCT |
| | TTGCGTCCAACGAGAGAAAACGAGGTACT | | TCTTCCCTCATAGCTTGATCCGAAAAAGT |
| | AAATAAGCTAA | | TACAGCTGG |
| 501 | TAACACCAATTAAATGTTTAGTTCCCTCT | 832 | TGTTCTTTTTTTGGTATCTCGTTTCTTCT |
| | TTGCGTCCAACGAGAGAAAACGAGGTACT | | TCTTCCCTCATAGCTTGATCCGAAAAAGT |
| | AAATAAGCTAA | | TACAGCTGG |
| 502 | GGTGAGGATGCGCTCGGAGTCGACCAGCG | 833 | CTTAAAGATTGAGTTTACTTTTGCAGTCA |
| | CCTTGGGGCACCCTAACGAAACCCATCCT | | TTGGGGCATCCAAGACTGACGAAGCCGAC |
| | ATACTAGGGG | | TTTGGGAG |
| 503 | TTTATCCCGTAAGGACATGAATGGTACCA | 834 | TAAATTTTGATGAATGGTGTGTTACGCGG |
| | CTTCTACTGTAGTTGTTACAAAACATTCA | | TAGACCGCACACGTTCCCCCAATATAACT |
| | CGTAAAAAAA | | TATTAATA |
| 504 | TATCCCGTAAGGACATGAATGGTACCACT | 835 | AATATTAATGAGTGTTATGTAACTAGAAA |
| | TCTACCGCAATAGTTACAAAACATTCATT | | GACCGCACACGTTCCCCCAATATAACTTA |
| | AAAAATAACC | | TTAATATT |
| 505 | GGATCAAAAAGAACGACGATTCTTTAGTG | 836 | TTTTCTTTTGTATCAAAATCAGTAGGAAC |
| | TTTTTGAAATAATCTTACTGAGTTTAATA | | ATAGATCCAACCATGGGTTCAGGTTCATT |
| | CAATGCCGTG | | GATGTTAA |
| 506 | CACTCCCAAAGTCGGCTTCGTCAGTCTTG | 837 | CCCCTAGTATAGGATGGGTTTCGTTAGGG |
| | GATGCCCCAATGATTGCAAAAGTAAACTC | | TGCCCCAAGGCGCTGGTCGACTCCGAGCG |
| | AATCTTTAAG | | CATCCTCA |
| 507 | GTGGATCACCTGGTTTTTCGTGTTCAGAT | 838 | CTCTTTTTATTAGGGTTTATATCAACTAT |
| | ACAGGCATGTAAAGTAGACATAAACAGCA | | ACACATACGAAGTGCTCCTGAGACAGAAA |
| | AAAATTTGATA | | GCGCATATC |
| 508 | TCTATTTAAATTGTCTATTTTATTGACAG | 839 | AAGATATTACCCTGAATGAAGTCTTACGT |
| | GGGACCAATCTCTGCTAAGATTACCAAAT | | CGTCAAATTGAAGTGGCCGCTAATCAGTT |
| | AACCCCGACAA | | CCTTCAAAA |
| 509 | TCTATTTAAATTGTCTATTTTATTGACAG | 840 | AAGATATTACCCTGAATGAAGTCTTACGT |
| | GGGACCAATCTCTGCTAAGATTACCAAAT | | CGTCAAATTGAAGTGGCCGCTAATCAGTT |
| | AACCCCGACAA | | CCTTCAAAA |
| 510 | CCGAGCTGCCGATCACCGAGATCGCGTTC | 841 | TGGCCTCTCCTGAAGTGTCAGTTGAGCGC |
| | GCGTCCGGCTTTCCGAGTGCGCGTGAACT | | CTTCGGTTTCGCCAGCGTGCGGCAGTTCA |
| | ACAGTTCTAGC | | ACGACACGA |
| 511 | GATCACCCAGGACGTCTGCGCCTTCTACG | 842 | CCTGTATTGTGCTACTTAGAGCATAAGGC |
| | AGGACCATGCCTTACAAGCTCAAAATAGC | | GACCATGCCCTCTACGACGCCTACACGGG |
| | ACACGTTTCCG | | CGTGGTGGT |
| 512 | ACCAGCTGTAACTTTTTCGGATCAAGCTA | 843 | TACGTTGTTTAGTACCTCAATTTCTCTCT |
| | TGAGGGACGGAGACGAATCGAGAAACTAA | | CTGGACGCAAAGAGGGAACTAAACACTTA |
| | AATTATAAATA | | ATTGGTGTT |
| 513 | ACTGGCGAAGCGATTCTTGGTGCGAACAT | 844 | AAACCCATTTTTACCTTATGTAAAAAAAT |
| | TTTCCGTGATATGTTTACCAAATGACAAA | | CACGTGATTTTTTTGCGGGCATCCGTGAT |
| | AATGATATAAT | | GTGGTCGGC |
| 514 | TTCTAACTCACGACACGTTGTGCTCTTAC | 845 | GGTTTTTTATTTGTATGCCATAATTATAC |
| | CAACCGCACTTGCGGTATGTCAATAAGAC | | ACCGCACTCGCTCCCTCAAACGCTATAAT |
| | ATACGAATTT | | CCCCATAG |
| 515 | GGTGAGGATGCGCTCGGAGTCGACCAGCG | 846 | CTTAAAGATTGAGTTTACTTTTGCAGTCA |
| | CCTTGGGGCACCCTAACGAAACCCATCCT | | TTGGGGCATCCAAGACTGACGAAGCCGAC |
| | ATACTAGGGA | | TTTGGGAG |
| 516 | GCTGTGGCGGTTCCAAATTGGTGAGGCGC | 847 | AACGTGCCTTTGTCGCAGCTGCCAAAGTT |
| | CAAATCCGCTCAACTTGGTGGCGACCGAT | | TAGCCGACGTCCCCCCATCCTGAGTAGCA |
| | GCCTGCGGTCA | | GTCGGGTTT |
| 517 | AAAATCTAAATTTTCTTTTGGCAGACCTT | 848 | CCTTTAATTTTTGGGTTAAAGGAACATTG |
| | CTTCGCTAGTGAGTGTTATATTAACCCAA | | ACTCTACTCGTAATATTACCTAACACGGA |
| | AAAGAGCCTAC | | ACGAAATAA |
| 518 | TACAGACTTACATGGGACCATTCTATAGC | 849 | TCAACTTTTAACCCTGTTTTAAGACCCAG |
| | AGCTTTAAAATACTTAGCAATAAAACAGG | | TATTAAGATGCGTGAGGGACAAGATTACC |
| | GGAATTGATA | | AGACTCAG |
| 519 | ATCACGATGGGGAGCAGTTCGATGTACCC | 850 | TCCGTGATAGGCCGCGTGGCGTCGCCTCA |
| | CATCTCCACCACTTACCCAAAACCCAACC | | GCACCAGGTCCTTCACCACATAGTCCGCC |
| | CTTATCGGTTG | | GCCCCCTGC |
| 520 | GGTTAAGTGTATGGATATGTTCCCAAATA | 851 | ACTCAAATGACATTCATTCTGTCCTCTCA |
| | CTCCACACGTTGAGTGCGTAGTATTGATG | | AGCCATTGTGAGACGTGCGTACTTTTGTC |
| | TCAAGGGTTG | | CCACAAAA |
| 521 | AACCAGCTGTAACTTTTTCGGATCAAGCT | 852 | TCAACTGGTTTAGTGCCTCATTTCCTCTC |
| | ATGAGGGAAGAAGAAGAAACGAGATACCA | | GTTGGACGCAAAGAGGGAACTAAACACTT |
| | AAAAAAGAACA | | AATTGGTGT |
| 522 | CGTTTATGAATGACTTGATTTTTGGTATG | 853 | AGACATTCATTTTTATTAGGGTTTATGTA |
| | TAAAGTATAAGCATGTAAACTTAACATAA | | AAGTATAAGCAGACAAAATGCTCCTGGGA |
| | ATACAAATAA | | TAAAAAGC |
| 523 | TCTTCAAGATCCAATAGGAATAGATAAAG | 854 | AACATTTTACAAGTATATAACATGTAATA |
| | AAGGCAATGAATTACCCTGGACAAGTTGT | | GGCAATGAAATCTCTTTAATGGATGTTTT |
| | CAGTCTAGGG | | AGGTACAG |
| 524 | AACAGTTCCTTTTTCAATGTTACTGTAAC | 855 | TTATTTATAGGTTTTTTGTCAAATACGGT |
| | CTGATGTGTACTTTACAAAAACACTATTT | | GATGTGTACCTATAGCCCATCCGTCGCGC |
| | TATATAAATA | | AATGAAAG |
| 525 | GGGGCAAATTGCTGCGATTTGGGTTGGAG | 856 | AGAATAATTATATGTCTTCTATTGGCGGT |
| | GGGGAACCCCAGCATAGACAATATACATA | | AATACGTTGATTCCATGGGCGCTCATTCC |
| | TAATCTTTCT | | AGCTGCTG |
| 526 | GTCTTCTGGACCATGATGCGCCACTTCCG | 857 | TGTATCTTGATGTACAACATTGCTCTTTA |
| | AAATTTCAAATACAGAATAATGTTGCATA | | TTTTCAAAAAGATCAGTGGTCAAACGGCT |
| | TAATATTACTA | | CATTAATTT |
| 527 | ATGAATTAATGTTTTAGTCGGTATACATC | 858 | GGTTATTTTTACGGAAGTATACACATTAA |
| | CGATATTAATCAGGTGTCTATACTTCCGT | | ATATTAATGCATGTACCGCCATACATCTT |
| | ACATATGTTA | | TGTTGATT |
| 528 | GATGTTCGTAGCAACTATGGGAGGAACCG | 859 | GGTTTTTATATGTGCGTTATGTAACAAGC |
| | GTGCAACGGCTATAGTTACATAACCCACA | | ACCACATTAGTTGTTCCATTTATGTTTAT |
| | TTAAAATATA | | GTGGTTAA |
| 529 | ATGAATTAATGTTTTAGTCGGTATACATC | 860 | TTATTTTTTTACGGAAGTATACACAATAA |
| | CGATATTAATAGAGTGTCTATACTTCCGT | | ATATTAATGCATGTACCGCCATACATCTT |
| | ACATATGTTA | | TGTTGATT |
| 530 | ACAGTTTACAGAAAGCTATGGCGGTACAT | 861 | TTGATATTTTATGGAAGTATGCACAATTA |
| | GCATAAATGTATAGTGTGTGTACTTCCAT | | ACCAACCATGGCTGTATTCCGTCTAAAGT |
| | ATATTTATGC | | GCTTGTTA |
| 531 | ATAGAAGCACACTGATGATGAGCAAGACC | 862 | AATTGGAAAATATAAATAATTTTAGTAAC |
| | ACCAACATCTCAATAAAGGATAGTAAAAT | | CTACATTTCCACAAGTGTGAAAGCTTTAA |
| | TATTGATTTT | | CCTTAGCT |
| 532 | ACCAGCTGTAACTTTTTCGGATCAAGCTA | 863 | TACGTTGTTTAGTACCTCAATTTCTCTCT |
| | TGAGGGACGGAGACGAATCGAGAAACTAA | | CTGGACGCAAAGAGGGAACTAAACACTTA |
| | AATTATAAATA | | ATTGGTGTT |
| 533 | GGATTTCGTTGCACTGATGGGCGGTACTG | 864 | CTCTTTTTTATGTATGGTTTGTAACAATA |
| | GCGCGACCTACAAAGTGCTAAACCATACA | | TCCACTTTACTCGTTCCTTATTTATTTAT |
| | TGTTAAAAAT | | ATTTCTTT |
| 534 | GGATTTCATTGCACTGATGGGCGGTACTG | 865 | TCTTTTTTTATGTATGGTTTGTAACAATA |
| | GCGCGACCTACAAAGTGCTAAACCATACA | | TCCACTTTACTCGTTCCTTATTTATTTAT |
| | TGTTAAAAAT | | ATTTCTTT |
| 535 | TATATGTCTTCATATAATCGAGCAATGTG | 866 | TTAGGGTTACCATTGATCATGAAGACCAT |
| | TTCAGATCATCCAGCTCATAGTATTTTGT | | TATATAGTTGAGTCCGTATAATTGTGTAA |
| | CTCTTTCTTT | | AAAGCTAG |
| 536 | GCGCGCCGACTTTATGCAGGATCACATTG | 867 | TTCAAGTCTAGGATACGAACAGTACGTTT |
| | CTGGGCACACGATAACGTGCCGTTCGTAA | | GCGCACTTCGAACAGAAAGTAGCCGAGGA |
| | ACCGACGAGC | | AGAAGATG |
| 537 | TTCGTTAATTGGAGCTACGGCCATTGGTG | 868 | AGATGTGATGTTAATTATTCTGGTCAGTA |
| | GACCTCCTGACCGGATTAATTAATATCAC | | CCTCCTGACCACCCCCACTCGTAAGTCAT |
| | TAGGAAATGGC | | AATAATTAC |
| 538 | TAATGCATACATTGTCGTTGTCTTCCCAG | 869 | TTAATATCAGTTGTATTTATACTACTAGC |
| | AACCAGTAGCTAACGTTATATAAATACAC | | TCTGTCGGTCCAGTAAACACGAGTAGCCC |
| | TTAAAATAAA | | CTGTGAAT |
| 539 | GCTCTGCAAAAGCTTGATCGTCGGTTCAA | 870 | AAACCCTTGATATACCAATAGTTTCAAAT |
| | ATCCGTCTACCGCCTTTATTATAGGATTT | | CCGTCTACCGCCTTTTAATATTCTAAAAA |
| | TGTCCGAATT | | ACCTAGGA |
| 540 | ACAATCATCAGATAACTATGGCGGCACGT | 871 | TTAATTTAGTATGGAAGTATGCACAATTG |
| | GCATTAATGTATAATGTGTGTACTTCCAT | | AGCAACCACGGTTGTATCCCGTCTAAAGT |
| | ATATTTATAC | | ACTCGTAC |
| 541 | ATGTACGAGTACTTTAGACGGGATACAAC | 872 | GTATAAATATATGGAAGTACACACATTAT |
| | CGTGGTTGCTCAATTGTGTATACTTCCAT | | ACATTAATGCACGTGCCGCCATAGTTATC |
| | ACTAAATTAA | | TGATGATT |
| 542 | ATGAAGATTATAATAATTGGAGGTGGCTG | 873 | TCACGTGTTTTAATGGAGTTTTAACTGGT |
| | GTCTGGATGTGCAGCACAGGTAAAACTAC | | CTGGATGTGCAGCAGCCATAACAGCTAAA |
| | ACTAATTATTA | | AAGGCAGGT |
| 543 | AACCCCAAAGTCGGCTTCGTCAGCCTTGG | 874 | TAGAAGTATAGGGTTTGTTTCATTGGGGT |
| | CTGCCCGAAGGATGGTTGAGATATACTTT | | GCCCGAAGGCCCTCGTCGATTCCGAGCGC |
| | TGGCGAGCAG | | ATCCTCAC |
| 544 | GAATCTAAATTTTCTTTCGGTAATCCTTC | 875 | CTTTAATTTTTGGGTTAAAGGAACATTGA |
| | TTCACTACTAAGTGTTATATTAACCCAAA | | CTCTACTCGTAATATTTCCTAATACAGAA |
| | AAAGAGCCTTC | | CGAAATAAA |
| 545 | CTGGCTTGATTAATAGTTTAAAAGTCTTG | 876 | TCCTGAATGGTTACTACGATTGGTTTGGT |
| | GCTGGTGTTATTGCTGTGAATAAAGTTGT | | TGGTGTCACGAACGGTGCAATAGTGATCC |
| | TGGTGTAACCA | | ACACCCAAC |
| 546 | CACTCCCAAAGTCGGCTTCGTCAGTCTTG | 877 | CCCCTAGTATAGGATGGGTTTCGTTAGGG |
| | GATGCCCCAACGAATAGAAAAGTAAACTA | | TGCCCCAAGGCGCTGGTCGACTCCGAGCG |
| | GCTTTCAGCG | | CATCCTCA |
| 547 | GGTGAGGATGCGCTCGGAGTCGACCAGCG | 878 | CTTAAAGATTGAGTTTACTTTTGCAGTCA |
| | CCTTGGGGCACCCTAACGAAACCCATCCT | | TTGGGGCATCCAAGACTGACGAAGCCGAC |
| | ATACTAGGGG | | TTTGGGAG |
| 548 | CACTCCCAAAGTCGGCTTCGTCAGTCTTG | 879 | CCCCTAGTATAGGATGGGTTTCGTTAGGG |
| | GATGCCCCAACGAATAGAAAAGTAAACCA | | TGCCCCAAGGCGCTGGTCGACTCCGAGCG |
| | GTTTTCAGCG | | CATCCTCA |
| 549 | GGTTAAGTGTATGGATATGTTCCCAAATA | 880 | ACTCAAATGACATTCATTCTGTCCTCTCA |
| | CTCCACACGTTGAGTGCGTAGTATTGATG | | AGCCATTGTGAGACGTGCGTACTTTTGTC |
| | TCAAGGGTTG | | CCACAAAA |
| 550 | AGCTTTCATTGCGCGACGGATGGGCTATA | 881 | TTTTTATATAATATAGTGTTTTTGTTAAG |
| | GGTACACATCACTATATTTGACAAAAAGT | | TACACATCAGGATACAGTAACATTGAAAA |
| | CTATAAATAA | | AGGAACTG |
| 551 | CGCATGTTCGCGGCCGGCACGCTGGTCAC | 882 | GCCCTGTTAATATGTATATTGGCTAACGC |
| | GCTCGGCAACCCGAACGTTAGCCAATATA | | TCGGCAACCCGAAGATCATGCTGTTCTAT |
| | CAAACCATGCT | | CTGGCATTG |
| 552 | CGCATGTTCGCGGCCGGCACGCTGGTCAC | 883 | GCCCTGTTAATATGTATATCGGCTAACGC |
| | GCTCGGCAACCCGAACGTTAGCCAATATA | | TCGGCAACCCGAAGATCATGCTGTTCTAT |
| | CAAACCATGCT | | CTGGCGTTG |
| 553 | GGGTGGAAATAATATAAAAGGTGGCCTTA | 884 | AAATTTATAGTGAGGGTTTGTCATAGACA |
| | TAGGTCCTCCAATAAGATACAAGAACACA | | AGACCTGGAGTTCACGCTTCACATGGTAT |
| | ACGGCTTAAAA | | GGAGAGAAC |
| 554 | TTTTCCCCCGAAAATCTTTAACACCACTA | 885 | TTATTTTGGTAGTTTATAGAAGTAATTTC |
| | TCTGTTGATATTCACTCCATTAACTACCA | | AGTTGATGTCCCAGCTCCTCCAAAAAAAA |
| | AAATAAAAAA | | CTAAATAT |
| 555 | TATCTTTTAACTGCAAGAGTACTACGGTT | 886 | TCCACACGTGTAAGCAGTCCTACACACTC |
| | TCCACGTGCGTTGAGAGTACACTCTGTAT | | GATGTGAGCTGTTTGCGGGAACATATCGA |
| | CTTCCTACTAT | | CGGGTTGCA |
| 556 | ATCTTTTAACTGCAAAAGTACTACGGTCT | 887 | TTACCCTAGACATCAATGCTACCAACTCA |
| | CTACATGGGACGAGTTGATAGAATTGATG | | ACATGAGCTGTTTGCGGGAACATATCGAC |
| | TATTTGCGAT | | TGGTTGCA |
| 557 | TAAGGGCATGGACATGTTTCCTCATACAC | 888 | GAAATGACGTACTTTTCATTTCCTCGTGC |
| | CTCATGTGGAGACGGTGGTATTGATGTCA | | CATGTGGAAACTGTAGTTAAGCTAAGCAA |
| | AGGGCGGAGA | | ATAATATC |
| 558 | GCTGGTGGTGGATATCGGCGGTGGTACGA | 889 | TCCATTAACTGTGGTGTACATCATAACAT |
| | CTGACTGTTCGTAGTCATGCAAGAATGTA | | AACTGTTCATTGCTGCTGATGGGACCGCA |
| | CACCGCAGTAA | | GTGGCGTTC |
| 559 | ATAATCATCAAAGAGTTTAGGATTATCAA | 890 | TACTTTAATTTTAGGTTAATGGTCCATTT |
| | ATTCACTAGTAAATGTTATATTAACCCAA | | CCTCTATGATACGCCCTTCCGAAAGCTGA |
| | AAAAAAGAGTC | | TACTAACGA |
| 560 | ACCAGCTGTAACTTTTTCGGATCAAGCTA | 891 | CACATTATTTAGTTCCTCGTTTTCTCTCG |
| | TGAGGGACGGAGAATAAATGAGAAACTAA | | CTGGACGCAAAGAGGGAACTAAACACTTA |
| | AATACAAATAA | | ATTGGTGTT |
| 561 | AACAATCTGCAAACATGTATGGCGGTACA | 892 | ATTAATTTTGTACGGAAGTAGATACTATC |
| | TGTATCAATATCCATGTTACTTAGTGCCA | | TTTCAACATTGGTTGTATTCCTACAAAGA |
| | TACAAAAACC | | CACTCATT |
| 562 | AGGGCCTGGCTGCTGAACTCGGGCGTCTC | 893 | TCGCGGCCCACTTGCTTTACACGTCTCGT |
| | GTCGAGGAACGAGACGTATAAAACAAGTG | | CCAGGAAGAGGACGCCCCGGTGGGACAGG |
| | GCTACGGCCAG | | GACACCGCG |
| 563 | ACAATCAACAAAGATGTATGGTGGTACAT | 894 | TAACGTATGTACGGAAGTATAGACACCTG |
| | GCATTAATATTTAATGTGTATACTTCCGT | | ATTAATATCGGATGTATACCTACTAAAAC |
| | ATTTTTTATA | | ATTAATTC |
| 564 | ATGGCTGTTGCGTTGATAGCGCCAAGCGT | 895 | GTTTTTTTGTTTGCGTTAAATGGAATTAT |
| | TACTAGTAGGACATTTCCTAAAAGTGGCT | | CCAGTACGGCATATGCAGTAGAAACAACG |
| | AATTTTTTGT | | AGTCAACA |
| 565 | TATCTTTTAACTGCAAGAGTACTACGGTT | 896 | TCTTGGCGAGTGAGCAGACCTATACACTC |
| | TCCACGTGCGTTGACTGTCTACTTAGTAT | | GATGTGAGCTGTTTGCGGGAACATATCGA |
| | CTTCCTACTAT | | CGGGTTGCA |
| 566 | ATTAACAAGCACTTTAGATGGAATACAGC | 897 | GCATAAATATATGGAAGTACACACACTAT |
| | CATGGTTGGTTAATTGTGCATACTTCCAT | | ACATTTATGCATGTACCGCCATAGCTTTC |
| | AAAATATTAA | | TGTAAATT |
| 567 | GACCACAATCCGCGTGTGGGCTTTGTATC | 898 | GAAGCCGTATAGTATAGGAATGGTGTCGC |
| | CCTTGGGTGCCCGAGTGATGCTTAAAATA | | TTGGGTGCCCCAAGGCACTCGTCGATTCG |
| | CACTCGGTGCT | | GAGCAGATC |
| 568 | TTCGACGAATGATGCTTTAGGGCTGAATG | 899 | TTCATTAGCTTTGTTATCACCCTGTTGGT |
| | GAGTAAATCTAATTACACCAACAAGGTGA | | AACAACCTCATGCGCCTAATGGCTACAAA |
| | CAACAAAGCA | | AAACATCT |
| 569 | CAAAAATTGCAGTGCGTTCAGCGATGACA | 900 | TTTCTGCATTGTCCTATTATAATTATGAG |
| | GGACATTTGGTCATTATAATAGACCTATA | | CCATTTGATCGCTTCGACGATGCATACGA |
| | CACATAAACA | | AAGACGCT |
| 570 | AATTTTCTTGTCGATTGGCTATTCGACTT | 901 | TATTCTTAGTGGGGCTTAAGTCAACTTGT |
| | GTCATTGGTGTCATGTTTTCTTAAGCCTC | | CATTGGTGTCATGTGATGGAGAGAGAATC |
| | AAAATAAAAA | | TTTTGAGG |
| 571 | TTTTAAAATGATTAAAGGCGGCGTTCCAA | 902 | CTATTAATTGGGGGTATGTCTTACTTATT |
| | TAAGCGTACCTATTTCGCACCCCCAATAA | | AGCGTACCCAAGCCCCCAATAGTGCCGGC |
| | ACACCCCACC | | ATAACCGA |
| 572 | GGGTGAGGATGCGCTCGGAATCGACAAGG | 903 | CATCTACCGCAAAGTATAGGTATTTAATC |
| | GCCTTCGGGCACCCCAATGAAACAAACCC | | CTTCGGGCAGCCAAGGCTGACGAAGCCGA |
| | TATACTTCTA | | CTTTGGGG |
| 573 | AGCAACCCCCCTGCTGTTGGGCTTAACGT | 904 | TCAAAAAAGCGTGAGTTTTAGATACCAAA |
| | GCTTCTCTAAAAGCGTATCTAAAACTCTC | | CATTCGATGAAAGTGATACTGAGCCTGAG |
| | ATTCAATAGG | | AAATTAGA |
| 574 | CCATCATAAGATGCCTTTTTACCGACGAG | 905 | AAAGCATTATTTAGGTACTACAACTAGTA |
| | TATAGTTGTACATGAAAAACGCTGTATTT | | TAGTTGTACATGCCATTATCAGTCTCCTT |
| | TTTTATCCAT | | TACAAACG |
| 575 | CCAGATCAGTGCGCCCCCGGCGGTCCAGA | 906 | AAATCCTCCCTTTTACATCTGTACGGGCT |
| | GCAGGAAGCAGGCACGTACGGTTGTAAAA | | TGGAAGCGGACATGGCCCATGCGGAAGAG |
| | GGAAATCCTA | | GCCCGCTG |
| 576 | TAACACCAATTAAGTGTTTAGTTCCCTCT | 907 | TCTTTATTTTTTTGTATCCCATTTCCTCT |
| | TTGCGTCCAACGAGAGAAAACGAGAAACT | | CCCTCCCTCATAGCTTGATCCGAAAAAGT |
| | AAACAATCTAA | | TACAGCTGG |
| 577 | AACAGTTCCTTTTTCAATGTTACTGTAAC | 908 | TTATTTATAGACTTTTTGTCAAATATAGT |
| | CTGATGTGTACTTTACAAAAACACTATTT | | GATGTGTACCTATAGCCCATCCGTCGCGC |
| | TATATAAATA | | AATGAAAG |
| 578 | GTGAATGATTTGGTTTTTAATATTTAAAA | 909 | TTTAATTTATTCGTATTTACGTTACCTTC |
| | AAAGAACTACTAACTTCACATAAACCCAA | | ACTACAACAAAATGTTCCTGATTAAGTGA |
| | ACTTTTTACA | | AGTCATGT |
| 579 | GTGGATCACCTGGTTTTTCGTGTTCAGAT | 910 | CTCCTTTTATTAGGGTTTGTGTCATCTAC |
| | ACAGGCATGTAAAGTTTACATAAACCCTA | | ACACATACGAAGTGCTCCTGAGACAGAAA |
| | AAAAGATCGAC | | GCGCATATC |
| 580 | ACTTTTTATATTGCAAAAAATAAATGGCG | 911 | AGTGTGGTTGTTTTTGTTGGAAGTGTGTA |
| | GACGAGGTAACAGCATAGTTATTCCGAAC | | TCAGGTATCAGGATACCTCATCTGCCAAT |
| | TTCCAATTAAT | | TAAAATTTG |
| 581 | TAACACCAATTAAGTGTTTAGTTCCCTCT | 912 | ATGTTCTTTTTTTGTATCTCGTTTCTTCT |
| | TTGCGTCCAACGAGAGAAAACGAGGAACT | | TCTTCCCTCATAGCTTGAACCGAAAAAGT |
| | AAACAATCTAA | | TACAGCTGG |
| 582 | AGATAAAACACTCTCCAGGAAACCCGGGG | 913 | TGAGACAAACAGCCATGGCTGGTTCCCGG |
| | CGGTTCATACAATTATTTGTTATTGTGCA | | ATACAGATGGCGCACTCATCACCGGACTG |
| | TCATTCTGGT | | ACCTTTCT |
| 583 | ATATGTTCCCGCAAACAGCTCACGTTGAG | 914 | TATCCCCTCCTCTCAAAACATGTAGAGAC |
| | ACGGTAGTATTGATGTCAAGGGTAGATAA | | CGTAGTACTTTTGCAGTTAAAAGATAAAT |
| | GTAAGAGTGT | | AAAGGACT |
| 584 | ATATGTTCCCGCAAACAGCTCACGTTGAG | 915 | TATCCCCTCCTCTCAAAACATGTAGAGAC |
| | ACGGTAGTATTGATGTCAAGGGTAGATAA | | CGTAGTACTTTTGCAGTTAAAAGATAAAT |
| | GTAAGAGTGT | | AAAGGACT |
| 585 | AACCAGCTGTAACTTTTTCGGATCAAGCT | 916 | TTAGCTTATTTAGTACCTCGTTTTCTCTC |
| | ATGAGGGAAGAAGAATAAACGAGATACCA | | GTTGGACGCAAAGAGGGAACTAAACACTT |
| | AAAAAGAACAT | | AATTGGTGT |
| 586 | TGTTAACCACATAAACATAAATGGTACAA | 917 | TAAATTTTAATAGCAGTTGTGTCACTATT |
| | CTAATGTCTATCGTGTGACAAAACTAACA | | TAGGTGGCACCTGTACCACCCATAGTTAC |
| | TACAAAAACC | | CACGAACA |
| 587 | AAATGTTCGTTGCAACTATGGGGGGTACC | 918 | AGTTTTATACATAAAAATAGTGTAACAAG |
| | GGTGCTACCTACCCTGTAACACTACTACC | | CACTACATTAGTCGTTCCATTTATGTTTA |
| | ATTAAAATTT | | TGTGGTTA |
| 588 | ATAATGCAACATAGTCTCCAGTACCACCT | 919 | AAAAAAAGGCGCTCTTTGATGTAGCGCCC |
| | TTATATGCTCACTACATGAAAAAGCGATA | | ATATGCACCAGCAGTTGCTGAAAAATCTA |
| | ATTTTAAGTA | | TATTTGTT |
| 589 | ACCAGCTGTAACTTTTTCGGATCAAGCTA | 920 | TAGATTGTTTAGTTCCTCGTTTCCTCTCG |
| | TGAGGGACGGAGAATAAATGAGATACTAA | | TTGGACGCAAAGAGGGAACTAAACACTTA |
| | TCCATAATAAT | | ATTGGTGTT |
| 590 | AACCAGCTGTAACTTTTTCGGATCAAGCT | 921 | TTAGATTGTTTAGTTCCTCGTTTTCTCTC |
| | ATGAGGGAAGAAGAAGAAACGAGATACCA | | GTTGGACGCAAAGAGGGAACTAAACACTT |
| | AAAAAGAACAT | | AATTGGTGT |
| 591 | ATGAATTAATGTTTTAGTAGGTATACATC | 922 | GGTTATTTTTACGGAAGTATACACATTAA |
| | CGATATTAATCAGGTGTCTATACTTCCGT | | ATATTAATGCATGTACCACCATACATCTT |
| | ACATATGTTA | | TGTTGATT |
| 592 | AGCTGCGCGCGCAGTATTTCTCGAAGGAG | 923 | ATGACTTCGATAGTTAATTATGAAACACT |
| | CCCATGGATATAGGTGCATCAAAATTAAC | | CTTGGATCCGGACGTATCCATCATGGCGA |
| | TAAAGGAAAA | | TAATGACC |
| 593 | TCATCACTACTTAATATATCCATAAGAGA | 924 | TGCGTTAGGTGTATATCATGCCTAGCGCA |
| | AATTTCATTACATCATACATGTTGTACAC | | ATTCATTTCCTTCTTTATCTACTCCTATA |
| | CTACTTTAAA | | GGATCTTG |
| 594 | AACCAGCTGTAACTTTTTCGGTTCAAGCT | 925 | TTAGCTTGTTTAGTACCTCGATTTCTCTC |
| | ATGAGGGAGGGAGAAGAAACGGGATACCA | | GTTGGACGCAAAGAGGGAACTAAACACTT |
| | AAAATAAAGAC | | AATTGGTGT |
| 595 | AACCAGCTGTAACTTTTTCGGATCAAGCT | 926 | TCAACTGGTTTAGTGCCTCATTTCCTCTC |
| | ATGAGGGAAGAAGAAGAAACGAGATACCA | | GTTGGACGCAAAGAGGGAACTAAACACTT |
| | AAAAAAGAACA | | AATTGGTGT |
| 596 | ATGAAGGACTTGATTTTTAGTATTGAGAT | 927 | AGAATTTTATTAGTATTTATGTCAGGTTT |
| | AAAGACATGTAAACATAACATAAACACAA | | AAGCAAACGAAATTTTCCTGTTGTAAAAA |
| | AAAATCTTAT | | CCTCATAT |
| 597 | TCCCCGTGTCGGCGGTTCGATTCCGTCCC | 928 | TATGTGGGTTTGGTTTTCTGTTAAACTAC |
| | TGGGCACCAAAATTCAGCGCCCAACTGTT | | ACCACCATGAATACGACGAAAAGGCTCAC |
| | CTCAGTTGGGC | | CTCCGGGTG |
| 598 | TCCCCGTGTCGGCGGTTCGATTCCGTCCC | 929 | TATGTGGGTTTGGTTTTCTGTTAAACTAC |
| | TGGGCACCAAAATTCAGCGCCCAACTGTT | | ACCACCATGAATACGACGAAAAGGCTCAC |
| | CTCAGTTGGGC | | CTCCGGGTG |
| 599 | AACCAGCTGTAACTTTTTCGGATCAAGCT | 930 | TTAGATTGTTTAGTATCTCGTTATCTCTC |
| | ATGAGGGAGGGAGAAGAAACGGGATACCA | | GTTGGACGCAAAGAGGGAACTAAACACTT |
| | AAAATAAAGAC | | AATTGGTGT |
| 600 | GGTGAGGATGCGCTCGGAGTCGACCAGCG | 931 | CGCTGAAAGCTAGTTTACTTTTCTATTCG |
| | CCTTGGGGCACCCTAACGAAACCCATCCT | | TTGGGGCATCCAAGACTGACGAAGCCGAC |
| | ATACTAGGGG | | TTTGGGAG |
| 601 | GAGTTCTCTCCATACCATGCGAAGCGTGA | 932 | ATTCTTTAAAAAGAGTTCTCGTATTTTAT |
| | ACTCCAGGTCTTGTCTATGACATACCCTC | | TGGAGGACCTATAAGGCCACCTTTTATAT |
| | ACTATAAATTT | | TATTTCCAC |
| 602 | GAAAGTTTTTCTGAATCCTCTTCATTCAT | 933 | TTCTCTAATCTTCTTTATTTCTACATACG |
| | TTGGCAACCGTATGTAGAAATAAAGAAGT | | GTCAACCCCAGGTTTCTATGAAAAATTCA |
| | ATTGAGTAGTA | | CCTATAACA |
| 603 | AGCCTCTGTGCCAAGTATATCTAAAAGAC | 934 | TAGAAAATAACATATAAAAAGTAGTGTTT |
| | TTATTTCATTACACACTACTCTTTATATG | | ATTTCATTACCTTCTTTATCTGTTCCGAT |
| | TTATTGGTAT | | AGGGTCTT |
| 604 | AGGCAGATCACCTGTAACCCTTCGATTAT | 935 | AGGCCAGAGCAGCGTCTGGCCTTTAAATA |
| | TCTTGGTGGTGGAATGGCGACGAAATAAA | | ATGGTGGAGCGGAGGAGGATCGAACTCCC |
| | AACCCAAAAT | | GACCTTCG |
| 605 | GTCTTCTGGACCATGATGCGCCACTTCCG | 936 | TGTATCTTGATGTACAACATTGCTCTTTA |
| | AAATTTCAAATACAGATTAATGTTGTATA | | TTTTCAAAAAGATCAGTGGTCAAACGGCT |
| | AAGTAACCCTG | | CATTAATTT |
| 606 | TATGCAACCCGTCGATATGTTCCCGCAAA | 937 | ATAGTAGGAAGATACTAAGTAGACAGTCA |
| | CAGCTCACATCGAGTGTGTAGGACTGCTT | | ACGCACGTGGAAACCGTAGTACTCTTGCA |
| | ACACGTGTGGA | | GTTAAAAGA |
| 607 | GTTAACAAGCACTTTAGACGGAATACAGC | 938 | ACATAAATATATGGAAGTACACACACTAT |
| | CATGGTTGGTTGATTGTGCATACTTCCAT | | ACATTTATGCATGTACCGCCATAGCTTTC |
| | AAAATATTAA | | TGTAAACT |
| 608 | GAATGATGCGTTGGGGCTTAATGGAGTAA | 939 | TATATTGTCATCACCCTGTTGGCGTCAAC |
| | ATCTAATTACACCAACAAGGTGACGACAA | | CTAATGCGCCTAATGGCTACAAAAGACAT |
| | AGCATAAACG | | CTACTTCG |
| 609 | GTATTATTAGGGGTGTTTGCAATCGGGGC | 940 | TACATATTTTCATTATAATTTAAAGACGG |
| | ACCAGGAGTACGAGGTGTCTTTAAATAGT | | TAGGAGTCCCTGGGGGGACAGTAATGGCA |
| | TATGAAATTA | | TCATTAGG |
| 610 | GAAGAGCACCGAGCGCAGGAAGAGCGTGT | 941 | GGTCAGGCGGCACCTAGGGGGGTGGTTAA |
| | ACTGCTCCCATGAGCGTTGCGCACACCCT | | CGCTCCCACGCCGTCCACTCCGTGATGCG |
| | AATGTTGCCTC | | CCGGTCCGA |
| 611 | CAGCCGGCTGATTTATTTCCAAATACGCA | 942 | TCCATAATATGGGTAAGACCTATCACCAC |
| | TCACGTGGAGTGTGTTGCTCTGCTTGTAA | | ACGTGGAGTGCGTAGTGTTGCTACAACGA |
| | AAGCTTAGAAA | | AGCAACGGG |
| 612 | CAGCCGACTGATTTGTTTCCGAATACGCA | 943 | ATATGACATCAATGCCATCAACTCGAGCC |
| | TCACGTGGAGTGTGTGGTTCTGCTCGTAA | | ACGTGGAGTGCGTAGTGTTGCTACAACGA |
| | AAGCCTAGAAA | | AGCAACGGG |
| 613 | AACCAGCTGTAACTTTTTCGGATCAAGCT | 944 | TTAGATTGTTTAGTTCCTCGTTTTCTCTC |
| | ATGAGGGAGGGAGAAGAAACGGGATACCA | | GTTGGACGCAAAGAGGGAACTAAACACTT |
| | AAAATAAAGAC | | AATTGGTGT |
| 614 | AGTTCAGCCCGTGGATTTGTTTCCAATGA | 945 | TCGTTCCATAATATGGGTAAGACCTATCA |
| | CGCATCACATCGAGTGTGTGGTTCTGCTC | | CCACATGTGGAGTGCATAGCGTTGATACA |
| | GTAAAAGCCT | | AAGAGTGA |
| 615 | CGGGCAAATTGCTGCCATATGGACCGGAG | 946 | CTATTTATTAGATGTCTAAACAGTGCATT |
| | GCGGGACTCTACAACCTATATTAGACATC | | ACTACTTTAATTCCTTGGGCGCTTATTCC |
| | TTATAAAAAGT | | TGCCGCTGC |
| 616 | GTAACACCAATTAAGTGTTTAGTTCCCTC | 947 | TATTTATAATTTTAGTTTCTCGATTCGTC |
| | TTTGCGTCCAGCGAGAGATAACGAGGTAC | | TCCGTCCCTCATAGCTTGATCCGAAAAAG |
| | TAAATAATCTA | | TTACAGCTG |
| 617 | TCTAACTCACGACACGTTGTACTCTTACC | 948 | CAGTTTTTATTTTATGCCTTAATTATACA |
| | AACCGCACTTGCGGTATGTCAATATGGCA | | CCGCACTTGCTCCCTCAAACGCTATAATC |
| | AAAAGCTATTC | | CCCATAGTT |
| 618 | AGGCAGATCACCTGTAACCCTTCGATTAT | 949 | AGGCCAGAGCAGCGTCTGGCCTTTAAATA |
| | TCTTGGTGGTGGAATGGCGACGAAATAAA | | ATGGTGGAGCGGAGGAGGATCGAACTCCC |
| | AACCCAAAAT | | GACCTTCG |
| 619 | AGCAGGATGGAGATAACGAGCATGACGAC | 950 | AAACAAAAATAAGGGGTTATTACCCCTAT |
| | TAACATTTCAATAAATATGGGTAATAACC | | TTATTTCTATCAGTGTAAATCCCTTTTCA |
| | CTTAAATGATT | | TTCACAGTT |
| 620 | CTTGTGGATCACCTGGTTTTTCGTGTTCA | 951 | TGTCTCTTTTTATTAGGGTTTATATCAAC |
| | GATACACACATGTAAAGTAGACATAAACA | | TACACACATACGAAGTGCTCCTGAGAGAG |
| | GCAAAAATTTG | | AAAGCGCAT |
| 621 | ATATCCCAAATGGAAAAGTTGTTAAACCG | 952 | AAAAATTTAGTTGGTTATTGGTTACTGTA |
| | TGTATAATCTTACGGTAACCAATAACCAA | | ACAAACGATACCAATCCCCCAACCTCCAA |
| | CTTTAAAACT | | GTGGATAT |
| 622 | TTTAAATTTTGTCCTTTCTTCCCGCTATA | 953 | TTTTTATTTTTATCCCCTAATTATACATG |
| | CCCGCTTCCTCATATGTCAATAAGGATAA | | GGATTGGCATTGTAAAAGATAAATAGTTC |
| | AAATATTATT | | GCCCACTC |
| 623 | ATGGCTGTTGCGTTGATAGCGCCAAGCGT | 954 | GTTTTTTTGTTTGCGTTAAATGGAATTAT |
| | TACTAGTAGGACAGTTCCTAAAAGTGGCT | | CCAGTACGGCATATGCAGTAGAAACAACG |
| | AATTTTTTGT | | AGTCAACA |
| 624 | CCAAATATTAAATTCTGCAGTAGGCGTCC | 955 | AAAGTTTAGATGGGGTTTGTGGGTAGAGC |
| | AATTTCCGAATAACACACCAAAACCCCCA | | CTCCCAAAGGTTCCTCCACCCATAATTGT |
| | CATATGCCAC | | TATAGAAT |
| 625 | CATTTTTACCTTGCTCTTCTCTCGAATTT | 956 | AGTTTTATTTTTGTCTGTATAGGCTGTCC |
| | CAGCATCTGCGGTATGCTTATAGGGACAA | | GCATCTGCATGGCGCATAACATATTTATG |
| | AAATTATAAA | | CGCTACAG |
| 626 | TTTGCGAGACTACGGATCTGGATCTCGTC | 957 | GCTAACAGATCGGCATATGAGTGCTATCT |
| | CCACTGCTGGCAGTGAACTGTACTCAGAC | | ACTGCTGGCGCGGTCCCGCGATATCGCGC |
| | GCAAATAAGCA | | CGCAGGTAC |
| 627 | AGAAAAGCACGCTGATAATCAGCAAGACC | 958 | AATTGGAAAATATAAATAATTTTAGTAAC |
| | ACCAACATTTCAATCAAGGATAGTAAAAC | | CTACATTTCCACAAGTGTAAAAGCTTTAA |
| | TCTCACTCTT | | CCTTCGCT |
| 628 | ACACCAGAAATCAAGGAGTCTTACCAGTA | 959 | TTTTATCAAAAATTTTACTATCCTTGATT |
| | TGGAAATGTAGGTTACTAAAATTATTTAT | | GAGATGAAAATACAAGCTTCTTTACCAGT |
| | ATTTTCCACTT | | ATGATTCCG |
| 629 | ATGTACGAGTACTTTAGAGGGTATACAGC | 960 | TTATTTTATTATGGAAGTTTGTACACTTA |
| | CGTGGTTGCAAGACTGTACATACTTCCAT | | ACATTTATGCATGTGCCGCCAAAGTTGTC |
| | AGTTTATTAA | | TGAGGATT |
| 630 | AACAATCTGCAAACATGTATGGCGGTACA | 961 | ATTAATTTTGTACGGAAGTAGATACTATC |
| | TGTATCAATATAGAACGTTTATAGTTCCA | | TTTCAACATTGGTTGTATTCCTACAAAGA |
| | TACAAAAATA | | CACTCATT |
| 631 | TGTAACACTTCATTTTTGACGTTCAGAAA | 962 | TAAAATAGTATGTATTTATGTAAGTTTAA |
| | CAGCACGACCAACCTTACATAAATGGTAA | | CCACGACGAAATGTTCCTGGTTCAATGAC |
| | CTATTATATAT | | GACATATCT |
| 632 | GCTTCTGGACGCGGGTTCGATTCCCGCCG | 963 | CCCGACAGTTGATGACAGGGTGCGACCCC |
| | CCTCCACCAATATCCGAACCCTAACCGCT | | ACCACCACCCAACACCCCGGAAAGCCCTT |
| | CTCGGTTGGG | | GTTTTACA |
| 633 | GCTTCTGGACGCGGGTTCGATTCCCGCCG | 964 | CCCGACAGTTGATGACAGGGTGCGACCCC |
| | CCTCCACCAATATCCGAACCCTAACCGCT | | ACCACCACCCAACACCCCGGAAAGCCCTT |
| | CTCGGTTGGG | | GTTTTACA |
| 634 | GTAACACCAATTAAGTGTTTAGTTCCCTC | 965 | TATTTATAATTTTAGTTTCTCGATTCGTC |
| | TTTGCGTCCAGAGAGAGAAATTGAGGTAC | | TCCGTCCCTCATAGCTTGATCCGAAAAAG |
| | TAAACAACGTA | | TTACAGCTG |
| 635 | ACCGTAAAATAACATTTCTGTTTTTCCAG | 966 | GTAATTATTTTATGTATTCATTTCCGGCT |
| | CCCCGCAAGTAGCTAGTCTTGAATACCGA | | ATTCACACAGCCCAAATAAAAAAAGATTT |
| | AAAAAAATTC | | TTTCTGCT |
| 636 | GAATGATGCGTTGGGGCTTAATGGAGTAA | 967 | TATATTGTCATCACCCTGTTGGCGTCAAC |
| | ATCTAATTACACCAACAAGGTGACGACAA | | CTAATGCGCCTAATGGCTACAAAAGACAT |
| | AGCGCGAACG | | CTACTTTG |
| 637 | GAAACTATGGGGATTATAGCGTTTGAGGG | 968 | GAATAACTTTTTGCCGTATTGACATACCG |
| | AGCAAGTGCGGTGTATAATTAAGGCATAA | | CAAGTGCGGTTGGTAAGAGTAGCACGTGT |
| | AATAAAAAACG | | CGTGAATTA |
| 638 | TTCGGACGCGGGTTCAACTCCCGCCAGCT | 969 | GAATGAATAGCTAATTACAGGGACGCCAG |
| | CCACCAAATAAAACAAGGGGTTACGTGAA | | CCCAAATATTGATGTACTGAAGTTCAGTA |
| | AACGTAGCCCC | | AAGTCTACT |
| 639 | AATTTTTAAAAAAAGTCGACAAGCATTTA | 970 | TAATAGAAAGAAAAATATATTTATTATAT |
| | CTCTAATTGAAACGGCTTATAGTCATTAT | | CTAATTGAAGCAGCAATTGTGCTTTTCAT |
| | GTTTATTTTG | | TATTAGTT |
| 640 | AGAGAAGTTGCCGGAAGCATGGTTCTAGT | 971 | TAGATAGAGTTTATGGATTATAAGAGGTT |
| | TTCTTTGGGCAAAACCTCTTGAAATACAT | | TATTGGAAGAAAAGAAGGAACGAAGGAGT |
| | AAAAAGAGTT | | TAACGCGT |
| 641 | CACCTGGCGTGGCGAAGTGCGCAGTCTGG | 972 | AAGAGATTCACCAAGACTTTTAGATTGAC |
| | AAGCACTAGTACGTTGGCAGTCACCTGAA | | CACCTAAATAGCTGCGCGGAATAGTAGAT |
| | CGTGGGTTGAT | | CACTTTGAG |
| 642 | ATAACGCATACATTGTTGTTGTTTTTCCA | 973 | ATCAATAACGGTTGTATTTGTAGAACTTG |
| | GATCCAGTTTTTTTAGTAACATAAATACA | | ACCAGTTGGTCCTGTAAATATAAGCAATC |
| | ACTCCGAATA | | CATGTGAG |
| 643 | TATGTTCAGGTTTGATCATTTTCCAAAAA | 974 | ACTCAAATGACATCAATTCTGTCCTCTCA |
| | CGTATCATGTGGAGTGTGTTGTCTTGATG | | AGACAAAGCGTGTGTGTTCAACGTTTTTT |
| | TCAAGGGTGG | | TCTTTTCC |
| 644 | TATGTTCAGGTTTGATCATTTTCCAAAAA | 975 | ACTCAAATGACATCAATTCTGTCCTCTCA |
| | CGTATCATGTGGAGTGTGTTGTCTTGATG | | AGACAAAGCGTGTGTGTTCAACGTTTTTT |
| | TCAAGGGTGG | | TCTTTTCC |
| 645 | TATGCAACCCGTCGATATGTTCCCGCAAA | 976 | ATAGTAGGAAGATACTAAGTAGACAGTCA |
| | CAGCTCACATCGAGTGTGTAGGACTGCTT | | ACGCACGTGGAAACCGTAGTACTCTTGCA |
| | ACACGTGTGGA | | GTTAAAAGA |
| 646 | TAACACCAATTAAGTGTTTAGTTCCCTCT | 977 | GTCTTTATTTTTGGTATCCCGTTTCTTCT |
| | TTGCGTCCAACGAGAGAAATCGAGGTACT | | CCCTCCCTCATAGCTTGAACCGAAAAAGT |
| | AAACAAGCTAA | | TACAGCTGG |
| 647 | GTAACACCAATTAAGTGTTTAGTTCCCTC | 978 | ATTATTATGGATTAGTATCTCATTTATTC |
| | TTTGCGTCCAGCGAGAGATAACGAGGTAC | | TCCGTCCCTCATAGCTTGATCCGAAAAAG |
| | TAAATAATCTA | | TTACAGCTG |
| 648 | GCTGGTGGTGGATATCGGCGGTGGTACGA | 979 | TCCATTAACTGTGGTGTACATCATAACAT |
| | CTGACTGTTCGTAGTCATGCAATAATGTA | | AACTGTTCATTGCTGCTGATGGGGCCGCA |
| | CACCGCAGTAA | | GTGGCGTTC |
| 649 | TATGCAACCAGTCGATATGTTCCCGCAAA | 980 | ATAGTAGGAAGATACAGAGTGTACTCTCA |
| | CAGCTCACATCGAGTGTGTAGGACTGCTT | | ACGCATGTAGAGACCGTAGTACTTTTGCA |
| | ACACGTGTGG | | GTTAAAAG |
| 650 | AACCAGCTGTAACTTTTTCGGATCAAGCT | 981 | TTAGCTTGTTTAGTACCTCGATTTCTCTC |
| | ATGAGGGAGGGAGAAGAAACGGGATACCA | | GTTGGACGCAAAGAGGGAACTAAACATTT |
| | AAAATAAAGAC | | AATTGGTGT |
| 651 | AACCAGCTGTAACTTTTTCGGATCAAGTT | 982 | TTAGATTATTTAGTACCTCGTTATCTCTC |
| | ATGATGGAAGAAGAAGAAACGAGAAACTA | | GCTGGACGTAAAGAGGGAACAAAGCACCT |
| | AAATTATAAAT | | AATAGGTGT |
| 652 | TAACACCAATTAAGTGTTTAGTTCCCTCT | 983 | GTCTTTATTTTTGGTATCCCGTTTCTTCT |
| | TTGCGTCCAACGAGAGATAACGAGATACT | | CCCTCCCTCATAGCTTGAACCGAAAAAGT |
| | AAACAATCTAA | | TACAGCTGG |
| 653 | ATAATCATCAAAGATTTTAGGATTATCAA | 984 | TACTTTAATTTTGGGTTAATGGTCCATTT |
| | ATTCACTAGTAAATGTATTATTAACCCAA | | CCTCTATGATACGCCCTTCCGAAAGCTGA |
| | AAAAAGAGTCT | | TACTAACGA |
| 654 | CATCTTTACTTTGCTCTTTTCTCGAATTT | 985 | AGTTTTATTTTTGTCTATATAGGCTGTCG |
| | CAGCATCTGCGGTATGCTTATAGGGACAA | | GCATCTGCGTGTCTCATAACGTATTTATG |
| | AAATTATAAA | | CGCTACAG |
| 655 | CTGTTTCAACAAATGATGCTCTTGGCCTT | 986 | AAAAATAAATATCTTTGTCGCCATCGTGT |
| | AATGGTGTAAACCTAATTACACCAACAAG | | TGGTGTAAACCTTATGCGTTTAATGGCGA |
| | GTGACAACAAA | | CAAAACATA |
| 656 | AGCTAAGTGTCCTAATTGGCCCCCGATCC | 987 | TACATAATTTCGTATATTAGGTATAACCA |
| | CGGTTTCAATTGGAAATACCTAATATACG | | GTTTCAATAGTTTGGGGAATCTTTGTAAG |
| | AAAAAGGTGT | | TGGTAAGC |
| 657 | CGGCCTTCCACTTACAAAAATTCCGCAGA | 988 | CGCCTTTTTTCGTATATTAGGTATTTCCA |
| | CAATTGAAACTGGTTATACCTAATATACG | | ATTGAAACCGGGATCGGGGGCCAATTAGG |
| | AAAATATGCA | | ACACTTAG |
| 658 | GTAGATGTTTTTTGTTGCCATTAGGCGCA | 989 | CGCTTTGTTGTCACCTTGTTGGTGTAATT |
| | TGAGGTTGTTACCAACAGGGTGATAACAA | | AGATTTACTCCATTAAGCCCTAAAGCATC |
| | AGCTAATGAA | | ATTCGTCG |
| 659 | AATATGTTTTGTCGCCATTAAACGCATAA | 990 | TTTGTCGTCACCTTGTTGGTGTAATTAGG |
| | GGTTTACACCAACATGATGACAACGAAGA | | TTTACACCATTAAGGCCAAGAGCATCATT |
| | TATTTACTTTT | | TGTTGAAAC |
| 660 | AATATGTTTTGTCGCCATTAAACGCATAA | 991 | TTTGTCGTCATCTTGTTGGTGTAATTAGG |
| | GGTTTACACCAACTTGATGACGACAAAAA | | TTTACACCATTAAGGCCAAGAGCATCATT |
| | TATTTATTTTT | | TGTTGAAAC |
| 661 | CGTCGTTAGTATCAGCTTTCGGAAGGGCG | 992 | AGACTCTTTTTTTGGGTTAATAAAACATT |
| | TATCATAGAGGAAATGGACCATTAACCTA | | TACTAGTGAATTTGATAATCCTAAAATCT |
| | AAATTAAAGTA | | TTGATGATT |
| 662 | GCGCGTGATATTGCGACGTATTTTAATCA | 993 | ACAATACATTTTACTTCAATGTATAGGTA |
| | TACATTCGGCACAGCGAGTTTATCTATAA | | CATTCGGCACGACATTTACACTTCCGAAG |
| | GTTGAAGTAA | | TATGTCAT |
| 663 | GTTTTTTGTTGCCATTAGGCGCATGAGGT | 994 | GTCGTCACCTTGTTGGTGTAATTAGGTTG |
| | TGACGCCAACAGGGTGATGACAATATAAA | | ACTCCATTAAGCCCTAGAGCATCATTCGT |
| | CATTTCTTTTT | | CGAAACAGC |
| 664 | ATTGATTCTACAACAGAAGTTGGCATACT | 995 | CGCTCCTTTAATTTTGCTTAAAGGAGCAA |
| | AGAAACTAGTATCTTATTTATCTTAAGCT | | AGACTAGTACTTTAAGAGCACCAAAAATA |
| | AAAATTAAAAT | | AATAATGTA |
| 665 | CATCTTTACTTTGCTCTTCTCTCGAATTT | 996 | AGTTTAATTTTTGTCTATATTGGCTGTCT |
| | CAGCATCTGCGGTATACTTATAGGGACAA | | GCATCTGCATGGCGCATCACATATTTATG |
| | AAATTATAAA | | CGCTACAG |
| 666 | AAAATTAACAAGCTAATAATGAACAAGAC | 997 | TTTTATACCTTTTTGAATATATTTAGAGA |
| | AATCGTCATTTCAATAGCACTCCCCAAAT | | TCGTCATTTCCACCAGGGTAAAGCCCTTG |
| | CTTTTTAATAG | | GCCACCCGT |
| 667 | TTTGTTGACTCGTTGTTTCTACTGCATAT | 998 | ACAAAAAATTAGCCACTTTTAGGAACTGT |
| | GCCGTACTGGATAATTCCATTTAACGCAA | | CCTACTAGTAACGCTTGGCGCTATCAACG |
| | ACAAAAAAAC | | CAACAGCC |
| 668 | TAACACCAATTAAGTGTTTAGTTCCCTCT | 999 | TGTTCTTTTTTTGGTATCTCGTTTCTTCT |
| | TTGCGTCCAACGAGAGAAAACGAGGTACT | | TCTTCCCTCATAGCTTGATCCGAAAAAGT |
| | AAATAAACTAA | | TACAGCTGG |
| 669 | GTCTTCTGGACCATGATGCGCCACTTCCG | 1000 | TGTATCTTGATGTACAACATTGCTCTTTA |
| | AAATTTCAAATACAGAATAATGTTGCATA | | TTTTCAAAAAGATCAGTGGTCAAACGGCT |
| | AAATAGCCCTG | | CATTAATTT |
| 670 | TAACACCAATTAAGTGTTTAGTTCCCTCT | 1001 | ATGTTCTTTTTTGGTATCTCGTTTCTTCT |
| | TTGCGTCCAGCGAGAGATAACGAGGTACT | | TCTTCCCTCATAGCTTGATCCGAAAAAGT |
| | AAATAATCTAA | | TACAGCTGG |
| 671 | CGCGACACCAGCCTCGTCGTGGTCCCGCA | 1002 | GGTTTTCTTTGCCCCTTTGCGCGCACAGT |
| | GTTCCACGTATGTGCGCGCAAAGGGGGAA | | CCCACGTCAACGCCTGGGGCCTGCCGCAC |
| | GGAGGCGGCC | | GCGGTGTT |
| 672 | GTGTCGGCAGCCCTGCAGGTCGGATATCG | 1003 | CTGCATCTACCATGTTCTACAATCTACCA |
| | CAGCATCGACACTTCATTGGTAGGACTTG | | GCATCGACACCGCCAAGATCTACGACAAC |
| | GTAGAACGGT | | GAGGCGGG |
| 673 | TCCGCAGCAATATCTTCATACAAATCGGC | 1004 | GCGCATTTAGTTTGTGTTTTTAAAAGCAA |
| | AATAGGATCTCCTTTTGCTTTTAAAGACA | | TAGGATCTCCTTTTGCCTGGATATAAGTG |
| | TAACAAATAGT | | GCAGTGAAT |
| 674 | TATCTTTTAACTGCAAGAGTACTACGGTT | 1005 | TCTTGGCGAGTGAGCAGACCTATACACTC |
| | TCCACGTGCGTTGACTGTCTACTTAGTAT | | GATGTGAGCTGTTTGCGGGAACATATCGA |
| | CTTCCTACTAT | | CGGGTTGCA |
| 675 | ACCAGCTGTAACTTTTTCGGATCAAGCTA | 1006 | TACGTTGTTTAGTACCTCAATTTCTCTCT |
| | TGAGGGACGGAGACGAATCGAGAAACTAA | | CTGGACGCAAAGAGGGAACTAAACACTTA |
| | AATTATAAATA | | ATTGGTGTT |
| 676 | CATTTTTACCTTGCTCTTCTCTCGAATTT | 1007 | AGTTTTATTTTTGTCTGTATAGGCTGTCC |
| | CAGCATCTGCGGTATGCTTATAGGGACAA | | GCATCTGCATGGCGCATAACATATTTATG |
| | AAATTATAAA | | CGCTACAG |
| 677 | ACCAGCTGTAACTTTTTCGGATCAAGCTA | 1008 | TAGATTATTTAGTACCTCGTTATCTCTCG |
| | TGAGGGACGGAGACGAATCGAGAAACTAA | | CTGGACGCAAAGAGGGAACTAAACACTTA |
| | AATTATAAATA | | ATTGGTGTT |
| 678 | TATGCAACCCGTCGATATGTTCCCGCAAA | 1009 | ATAGTAGGAAGATACTAAGTAGACAGTCA |
| | CAGCTCACATCGAGTGTGTAGGTCTGCTT | | ATGCACGTGGAAACTGTAGTACTCTTGCA |
| | ACTCGTGTAGA | | GTTAAAAGA |
| 679 | TCGTTTCAATATGTCCGTACATGGAATAA | 1010 | ATCATCCTTATACGTGTTTAGCTATGTAA |
| | TAAAGCACCAGTATTCTTGCCTTAACACT | | AAGCACCAGAACTTTAGCCATTTCTAACC |
| | CATGGTATTC | | ACTCCTCG |
| 680 | CGAACATCTATAAATTCTGTATTGGTAGA | 1011 | GGTTTTTTTGTGTGTGGTTTTGTATGTTA |
| | AACATCACAATCAAAATGCTAATACCACA | | AATCACAGGTGCTTTCCCTCCTGGTGAAC |
| | CACTACAATA | | AGTACAAC |
| 681 | ATAGTATTAGCTGGCGGATGTGCAACTGG | 1012 | ATTACAATATTACTTTATTTAGTCTATCT |
| | CACATGGTGGAACTGGACTGAATTAAGTC | | TTAGGTATCGAGCTGGGGAAGGATTAATT |
| | AAAATATAAAC | | GGTAGTTGG |
| 682 | CGACAAGGACACCACGCTCGTCGTGGTCC | 1013 | CACCTTTTTTATTTGCCCCTTTAGGCGCA |
| | CTCAATTTCACGTCTGTGAGCCTAAAGGG | | CTGTTCCACGTGAACGCCTGGGGCCTGCC |
| | GCATCCCCAC | | GCACGCCA |
| 683 | GACGACGTCAAATGAGAAATCTGTTACAC | 1014 | TTTTTACAAAGAGGTATTTAGATACATGA |
| | GTGTAACAATGCCTGTATCTAAATACCTC | | GCTACATTAGCAGTTAACCGCCGTTTTAA |
| | TAAAGAAAGAC | | ATCGCAAAA |
| 684 | CTGTGCCGCCCGAGTGATCTGCGTGCACA | 1015 | AAAGTTTTTTTAGACGTACTAACCAATAT |
| | ATCATCCCAGCGGAAAGTATCAGTTAGGC | | CATCCCAGCGGCAGTCCCCAACCTTCGCA |
| | ACATAAATTAG | | GGCGGATAT |
| 685 | ATGGCTGTTGCGTTGATAGCGCCAAGCGT | 1016 | GGTTTTTTGTTTGCGTTAAATGGAATTAT |
| | TACTAGTAGGACAGTTCCTAAAAGTGGCT | | CCAGTACGGCATATGCAGTAGAAACAACG |
| | AATTTTTTGT | | AGTCAACA |
| 686 | GAATGATGCGTTGGGGCTTAATGGAGTAA | 1017 | TATATTGTCATCACCCTGTTGGCGTCAAC |
| | ATCTAATTACACCAACAAGGTGACGACAA | | CTAATGCGCCTAATGGCTACAAAAGACAT |
| | AGCACGAACG | | CTACTTTG |
| 687 | GTCTTCTGGACCATGATGCGCCACTTCCG | 1018 | TGTATCTTGATGTACAACATTGCTCTTTA |
| | AAATTTCAAATACAGATTAATGTTGTATA | | TTTTCAAAAAGATCAGTGGTCAAACGGCT |
| | AAGTAACCCTG | | CATTAATTT |
| 688 | ATAGAAATAGACCTTTCCACTGGCCAAGG | 1019 | AATTATTACTTGTGTTTTTGTAGTGGTTG |
| | AGCTGATAAAACTATTACAAATACACAAG | | CTGATAAAACCATGCAACAAGTTTTAAGT |
| | TATAGAAATAG | | AAAAGTGCA |
| 689 | TTGATATGATATTTTATAACGGTTAATAT | 1020 | GGGAAAGTTTTGGGGAAGATTTTACATCA |
| | ATTTATAATAAATATCCTCCGGCATAGCC | | TCATAAAACAACGGGCGTGTTATACGCCC |
| | GGAGGTTTTT | | GTTTCAAT |
| 690 | AACGTTTGTAAAGGAGACTGATAATGGCA | 1021 | ATGGATAAAAAAATACAGCGTTTTTCATG |
| | TGTACAACTATACTAGTTGTAGTGCCTAA | | TACAACTATACTCGTCGGTAAAAAGGCAT |
| | ATAATGCTTT | | CTTATGAT |
| 691 | GATAGTGATCGAATATATTCATGGTATGC | 1022 | TAAAATGTTCCCATTGATTGTGGTGTGTG |
| | CGTCCTTTCGTATACTATGGGAACATTTT | | TCCTTTCGTTTTTTAGCACAGGTTAAGAG |
| | GATTTAATAC | | CCGTTCAT |
| 692 | CCCGAAGGATGCTCCCCGCTCCACCACCG | 1023 | TGGGGTCTTGCATCCAGCGTGAATGGTTG |
| | TTTATGAAACTTTCATGCCACGCTGGATA | | TGCGACCCGACCTGTGGATCTGGTTCGCT |
| | CAAACGCGCG | | GTTGATCA |
| 693 | AATGTTTATCGTTACTTTTGGAGGTACGG | 1024 | TTTTTTTACGTGAATGTTTTGTAACTACT |
| | GTGCAACCTACCTCGTAACACACCATTCA | | ACGACATTGGTCGTCCCGTTCATGTTTAT |
| | TCAAAATCTA | | GTGGATGA |
| 694 | TAACTCACGACACGTTGTGCTCTTACCAA | 1025 | GTTTTTATTTTATGCCTTAATTATACACC |
| | CCGCACTTGCAGTATGTCAATATGGCAAA | | GCACTTGCTCCCTCAAACGCTATAATCCC |
| | AAGCTATTCT | | CATAGTTT |
| 695 | ACAATCATCAGATAACTATGGCGGCACGT | 1026 | TTAATTTAGTATGGAAGTATGCACAATTA |
| | GCATTAATGTTTAGTGTGTATACTTCCAT | | ACCAACCACGGTTGTATCCCGTCTAAAGT |
| | AAAAATTAAC | | ACTCGTAC |
| 696 | TATGCAACCAGTCGATATGTTCCCGCAAA | 1027 | ATAGTAGGAAGATACTAAGTAGACAGTCA |
| | CAGCTCACATCGAGTGTGTAGGACTGCTT | | ACGCATGTAGAGACCGTAGTACTTTTGCA |
| | ACACGTGTGG | | GTTAAAAG |
| 697 | GCAACCGGCATCAATGTAATACCGATAAT | 1028 | CAAATAATGTAGTACCCAAATTATGTTTC |
| | CGTAACAAGCAACCTTAATCGGGTACTAC | | ACACAACAGAGCCTGTCACGACCGGCGGA |
| | TTAATATCTA | | AAAAACGA |
| 698 | AAGAACACTAATAATCAGCAAAACAACTA | 1029 | TGGAAAATTTGATAAATTTGGTTACGTTC |
| | GCATTTCAATCAAGGATAGTGAAATTATT | | ATTTCAATCAGCGTAAAAGCTTTTACTTT |
| | GCTTTTTCGAA | | GAGTGTACG |
| 699 | GAGAGAGTAGAGTGTTGTTGTCTTGCCAG | 1030 | CTTGTTTTATTAATATTTACGTAACGTTA |
| | ACCCAGTTGGTAGCGTTACGTAAATATAA | | TCAGTTGGACCGGTCAGAATTATTAATCC |
| | CTAATTATTTA | | GTGTGCATG |
| 700 | CTTGTAAAACAAGGGCTTTCCGGGGTATT | 1031 | CCCAACCGAGAGCGGTTAGGGTTCGGATA |
| | GGGTGGTGGTGGGGTCGCACCCTTGTATG | | TTGGTGGAGGCGGCGGGAATCGAACCCGC |
| | AAACTGACCT | | GTCCAGAA |
| 701 | CTTGTAAAACAAGGGCTTTCCGGGGTATT | 1032 | CCCAACCGAGAGCGGTTAGGGTTCGGATA |
| | GGGTGGTGGTGGGGTCGCACCCTTGTATG | | TTGGTGGAGGCGGCGGGAATCGAACCCGC |
| | AAACTGACCT | | GTCCAGAA |
| 702 | CACTCCCAAAGTCGGCTTCGTCAGTCTTG | 1033 | CTCCCAGTGTAGGATTTATATCGCTAGGG |
| | GATGCCCCAACGAATAGAAAAGTAAACCA | | TGCCCCAAGGCGCTGGTCGACTCCGAGCG |
| | GTTTTCAGCG | | CATCCTCA |
| 703 | CACTCCCAAAGTCGGCTTCGTCAGTCTTG | 1034 | CCCCTAGTATAGGATGGGTTTCGTTAGGG |
| | GATGCCCCAACGAATAGAAAAGTAAACCA | | TGCCCCAAGGCGCTGGTCGACTCCGAGCG |
| | GCTTTCAGCG | | CATCCTCA |
| 704 | ATGATCTGCTCCGAATCGACGAGTGCCTT | 1035 | AGCGATGAGTATACTTTTGCTATCCTACG |
| | GGGGCACCCAAGCGACACCATTCCTATAC | | GGCACCCAAGGGATACAAAGCCCACACGC |
| | TATACGGCTTC | | GGATTGTGG |
| 705 | GTCTTCTGGACCATGATGCGCCACTTCCG | 1036 | TGTATCTTGATGTACAACATTGCTCTTTA |
| | AAATTTCAAATACAGAATAATGTTGCATA | | TTTTCAAAAAGATCAGTGGTCAAACGGCT |
| | TAATATTACTA | | CATTAATTT |
| 706 | AAAGCTAAGGTTAAAGCTTTTACATTGAT | 1037 | AAGAGTGAGAGTTTTACTATCCTTGATTG |
| | TGAAATGTAGGTTACTAAAATTATTTATA | | AAATGTTGGTGGTCTTGCTGATTATCAGC |
| | TTTTCCAATT | | GTGCTTTT |
| 707 | TAGATACACCTGCAATTTGTTGTAATGGC | 1038 | CTTCTAATTTTTGTTTGTATAAGCATAAC |
| | ACTTATTTGAGTGTGTGACGCTTATTACA | | ACATTTGTATGATTATCAGGCAAAAAAGG |
| | ACATTTTCACC | | TTTTAGAAT |
| 708 | TCGTACGCCGGGGAGACGACGTTCGCCGC | 1039 | AGCTCGGGTTCTTCGTGTTTTGCCACGTA |
| | GATGTTGACCGACAGACACGGCAAAACAC | | TGTTGACCGAGAGCGTGGCGACGAGGACG |
| | GCAGCGCCTAT | | GTCACCAGG |
| 709 | GGATTTCGTTGCACTGATGGGCGGTACTG | 1040 | TCTTTTTTTATGTATGGTTTGTAACAATA |
| | GCGCGACCTACAATGTGCTAAACCATACA | | TCCACTTTACTCGTTCCTTATTTATTTAT |
| | TGTTAAAAAT | | ATTTCTTT |
| 710 | AGTACAACCAGTCGATTTATTCCCACAAA | 1041 | ATAGTAGGAAGATACAGAGTGTACTCTCA |
| | CACATCACATCGAGTGTGTAGGACTGCTT | | ACGCATGTGGAATTAGTGGCGCTATTAGC |
| | ACACGTGTGG | | ACCTAAGG |
| 711 | AGTACAACCAGTCGATTTATTCCCACAAA | 1042 | ATAGTAGGAAGATACAGAGTGTACTCTCA |
| | CACATCACATCGAGTGTGTAGGACTGCTT | | ACGCATGTGGAATTAGTGGCGCTATTAGC |
| | ACACGTGTGG | | ACCTAAGG |
| 712 | ACATAAAAATATAGATTTTCCAGGGCATA | 1043 | CGAAATATCGCAATTACATAAAGCATGTA |
| | ATCATGCATGGTTTATAGTATTGCAACCA | | CATGCATGGCTATATGATGTGAATAAAAT |
| | TTCTACCAAAT | | AGAACCCGA |
| 713 | GTCTTCTGGACCATGATGCGCCACTTCCG | 1044 | TGTATCTTGATGTACAACATTGCTCTTTA |
| | AAATTTCAAATACAGAATAATGTTGCATA | | TTTTCAAAAAGATCAGTGGTCAAACGGCT |
| | TAATATTACTA | | CATTAATTT |
| 714 | GGTTAAGTGTATGGATATGTTCCCAAATA | 1045 | TGTTGAATAGGTTGGTCATTGGAGAACCG |
| | CGCCACACGTTGAGAGCGTAGTATTGTTG | | AGCCATTGTGAGACTGTAGTTAAACTTAT |
| | ACTAAAGCAC | | TAGAGAAT |
| 715 | GGTTAAGTGTATGGATATGTTCCCAAATA | 1046 | TGTTGAATAGGTTGGTCATTGGAGAACCG |
| | CGCCACACGTTGAGAGCGTAGTATTGTTG | | AGCCATTGTGAGACTGTAGTTAAACTTAT |
| | ACTAAAGCAC | | TAGAGAAT |
| 716 | AAAGCGAATGGCAAGCTCAGGCCACTCGG | 1047 | TTGAGCACTTGTGCAGTTCGCGTTGACCG |
| | CATTCCGACGGTGACTTCATAATGCACCT | | TCCCGAGCCTGCGGGATCGGATCGTGCAG |
| | CTCACAGTTG | | CGGGCTAT |
| 717 | TAAGAAGAAAGACTCTTTTTTTATTTGGG | 1048 | TGAATTTTTTTCGGTATTCAAGACCAGCT |
| | CTGTGTGAATAGCCCGAAATGAATACATA | | ACTTGCGGGGCTGGAAAAACTGAAATGCT |
| | AAAAGATAAC | | ATTTTACG |
| 718 | GACTGCGCCTCTAAAGATTTCCCTTGGAT | 1049 | CGTTTATAGTGTTTTAGGTGGTTGGCACC |
| | GAGCTACCGACATAGCTATATCAACCCTC | | CCTACCGATTGACTTAATCCCCCAACAAA |
| | AATAAATTTAT | | AGTCGTTTC |
| 719 | TCACACAATTGACCAACTATTAGTAACTC | 1050 | CTAATAATTGTATCAAATATGGAACGCAT |
| | ACGCAGAAGTGTGAGTTCTGAAATTGATA | | ACCGATACTGATCATATGGGGGATATCGA |
| | CAATACAACT | | AGTGGTTG |
| 720 | TCACACAATTGACCAACTATTAGTAACTC | 1051 | CTAATAATTGTATCAAATATGGAACGCAT |
| | ACGCAGAAGTGTGAGTTCTGAAATTGATA | | ACCGATACTGATCATATGGGGGATATCGA |
| | CAATACAACT | | AGTGGTTG |
| 721 | CCATCATAAGATGCCTTTTTACCGACGAG | 1052 | AAAGCATTATTTAGGCACTACAACTAGTA |
| | TATAGTTGTACATGAAAAACGCTGTATTT | | TAGTTGTACATGCCATTATCGGTCTCCTT |
| | TTTTATCCAT | | TACAAACG |
| 722 | CCATCATAAGATGCCTTTTTACCGACGAG | 1053 | AAAGCATTATTTAGGCACTACAACTAGTA |
| | TATAGTTGTACATGAAAAACGCTGTATTT | | TAGTTGTACATGCCATTATCAGTCTCCTT |
| | TTTTATCCAT | | TACAAACG |
| 723 | CCATCATAAGATGCCTTTTTACCGACGAG | 1054 | AAAGCATTATTTAGGCACTACAACTAGTA |
| | TATAGTTGTACATGAAAAACGCTGTATTT | | TAGTTGTACATGCCATTATCAGTCTCCTT |
| | TTTTATCCAT | | TACAAACG |
| 724 | ACGTTTGTAAAGGAGACTGATAATGGCAT | 1055 | TGGATAAAAAAATACAGCGTTTTTCATGT |
| | GTACAACTATACTCGTTGTAGTGCCTAAA | | ACAACTATACTCGTCGGTAAAAAGGCATC |
| | TAATGCTTTTA | | TTATGATGG |
| 725 | ACCTCCGCGCGGTCGCGCCGCGTGCGGTC | 1056 | AACGATGCTCGCGAGTCCTTTAGAGACAC |
| | GTTCACCCACGTCAGTGGATCTAAAGGAC | | TGACCCAGGGGTCCGGCAGGAACAGCCGC |
| | CACATCGGAGC | | CAGTTGACG |
| 726 | ACAATCAACAAAGATGTATGGTGGTACAT | 1057 | TAACTTATGTACGGAAGTATAGACACTC |
| | GCATTAATATTTAATGTGTATACTTCCGT | | GATTAATATCGGATGTATACCTACTAAA |
| | AAAAATAACC | | ACATTAATTC |

Alternative Recognition Sites

| 1720 | AAAATATTTAGTTTTCTTTGGAGGAGCTG | 1776 | TTTTTAAATTTTGGTAATTAATGGAGTG |
|---|---|---|---|
| | GGACATCAACTGAAATTACTTCTATAAAC | | AACATCAACGGATAGCGGTGTTAAAGAT |
| | TACCAAAATA | | TTTCGGGGAA |
| 1721 | AACAGTTCCTTTTTCAATGTTACTGTATC | 1777 | TTATTTATAGACTTTTTGTCAAATATAG |
| | CTGATGTGTACTTTACAAAAACACTATTT | | TGATGTGTACCTATAGCCCATCCGTCGC |
| | TATATAAATA | | GCAATGAAAG |
| 1722 | AACCAGCTGTAACTTTTTCGGTTCAAGCT | 1778 | TTAGCTTATTTAGTACCTCGTTTTCTCT |
| | ATGAGGGAGGGAGAAGAAACGGGATACCA | | CGTTGGACGCAAAGAGGGAACTAAACAC |
| | AAAATAAAGAC | | TTAATTGGTGT |
| 1723 | AAGTGTAATATGTTTGGGTATGGGGAAGT | 1779 | GAAAAAAAGTGTACATGGTAGAGAGTTA |
| | GAATCAGTTTAATACTCCACCATGTACAC | | AACCAGTACAATCGCCACAGTACACTTA |
| | GAAGTGAAAA | | TGTCAGCCTA |
| 1724 | AATGAGCTAAAAGCTGTGGCCCAGTCATC | 1780 | TTTATTTAATGTAGTTAGGTTGTGTTTA |
| | AATTGACCAAACACTATATAACTACAATA | | ATTGACCAAACCATGGTGTTTGAAATGC |
| | AAAGAGCACA | | ACTGCCGCCA |
| 1725 | ACAATCAACAAAGATGTATGGCGGTACAT | 1781 | TAACTTATGTACGGAAGTATAGACACTT |
| | GCATTAATATTTAATGTGTATACTTCCGT | | GATTAATATCGGATGTATACCGACTAAA |
| | ATTTTTATAG | | ACATTAATTC |
| 1726 | ACAATCGTCAGATAATTTTGGCGGTACAT | 1782 | TTAATAAACTATGGAAGTATGTACAGTC |
| | GCATAAATGTTGAGTGAACAAACTTCCAT | | TTGCAATCACGGCTGTATCCCCTCTAAA |
| | AATAAAATAA | | GTGCTCGTGC |
| 1727 | ACCAGCTGTAACTTTTTCGGATCAAGCTA | 1783 | TAGATTATTTAGTACCTCGTTATCTCTC |
| | TGAGGGACGGAGACGAATCGAGAAACTAA | | GCTGGACGCAAAGAGGGAACTAAACACT |
| | AATTATAAATA | | TAATTGGTGTT |
| 1728 | ACCGTAAAATAGCATTTCAGTTTTTCCAG | 1784 | GTTATCTTTTTATGTATTCATTTCGGGC |
| | CCCCGCAAGTAGCTGGTCTTGAATACCGA | | TATTCACACAGCCCAAATAAAAAAAGAG |
| | AAAAAATTCA | | TCTTTCTTCT |
| 1729 | AGCAACGCCAGATAGAACAGCATGATCTT | 1785 | AGCATGGTTTGTATATTGGCTAACGTTC |
| | CGGGTTGCCGAGCGTTAGCCAATATACAT | | GGGTTGCCGAGCGTGACCAGCGTGCCGG |
| | ATTAACAGGGC | | CCGCGAACATG |
| 1730 | AGCTTTCATTGCGCGACGGATGGGCTATA | 1786 | TATTTATATAAAATAGTGTTTTTGTAAA |
| | GGTACACATCACCATATTTGACAAAAAAC | | GTACACATCAGGTTACAGTAACATTGAA |
| | CTATAAATAA | | AAAGGAACTG |
| 1731 | ATAATCATCAAAGATTTTAGGATTATCAA | 1787 | TACTTTAATTTTAGGTTAATGGTCCATT |
| | ATTCACTAGTAAATGTTTTATTAACCCAA | | TCCTCTATGATACGCCCTTCCGAAAGCT |
| | AAAAAGAGTCT | | GATACTAACGA |
| 1732 | ATAATCATCAAAGATTTTCGGATTATCAA | 1788 | TACTTTAATTTTAGGTTAATGGTCCATT |
| | ATTCACTAGTAAATGTTTAATTAACCCAA | | TCCTCTATGATATGCCCTGCTGAAAGCT |
| | AAAAAGAGTCT | | GATACTAACGA |
| 1733 | ATCTTTTAACTGCAAAAGTACTACGGTCT | 1789 | CCACACGTGTAAGCAGTCCTACACACTC |
| | CTACATGCGTTGAGAGTACACTCTGTATC | | GATGTGAGCTGTTTGCGGGAACATATCG |
| | TTCCTACTAT | | ACTGGTTGCA |
| 1734 | ATCTTTTAACTGCAAAAGTACTACGGTCT | 1790 | CCACACGTGTAAGCAGTCCTACACACTC |
| | CTACATGCGTTGAGAGTACACTCTGTATC | | GATGTGAGCTGTTTGCGGGAACATATCG |
| | TTCCTACTAT | | ACTGGTTGCA |
| 1735 | ATGAATTAATGTTTTAGTAGGTATACATC | 1791 | TATAAAAAATACGGAAGTATACACATTA |
| | CGATATTAATCAGGTGTCTATACTTCCGT | | AATATTAATGCATGTACCACCATACATC |
| | ACATACGTTA | | TTTGTTGATT |
| 1736 | ATGTACGAGTACTTTAGACGGGATACAAC | 1792 | GTATAAATATATGGAAGTACACACATTA |
| | CGTGGTTGCTCAATTGTGCATACTTCCAT | | TACATTAATGCACGTGCCGCCATAGTTA |
| | ACTAAATTAA | | TCTGATGATT |
| 1737 | ATTTAACATCAATGAACCTGAACCCATGG | 1793 | CACGGCATTGTATTAAACTCAGTAAGAT |
| | TTGGATCTATGTTCCTACTGATTTTGATA | | TATTTCAAAAACACTAAAGAATCGTCGT |
| | CAAAAGAAAA | | TCTTTTTGAT |
| 1738 | ATTTAACATCAATGAACCTGAACCCATGG | 1794 | CACGGCATTGTATTAAACTCAGTAAGAT |
| | TTGGATCTATGTTCCTACTGATTTTGATA | | TATTTCAAAAACACTAAAGAATCGTCGT |
| | CAAAAGAAAA | | TCTTTTTGAT |
| 1739 | ATTTATTTCGTTCCGTGTTAGGTAATATT | 1795 | GTAGGCTCTTTTTGGGTTAATATAACAC |
| | ACGAGTAGAGTCAATGTTCCTTTAACCCA | | TCACTAGCGAAGAAGGTCTGCCAAAAGA |
| | AAAATTAAAGG | | AAATTTAGATT |
| 1740 | CACTCCCAAAGTCGGCTTCGTCAGTCTTG | 1796 | CCCCTAGTATAGGATGGGTTTCGTTAGG |
| | GATGCCCCAACGAATAGAAAAGTAAACTA | | GTGCCCCAAGGCGCTGGTCGACTCCGAG |
| | GCTTTCAGCG | | CGCATCCTCA |
| 1741 | CACTCCCAAAGTCGGCTTCGTCAGTCTTG | 1797 | CCCCTAGTATAGGATGGGTTTCGTTAGG |
| | GATGCCCCAATGACTGCAAAAGTAAACTC | | GTGCCCCAAGGCGCTGGTCGACTCCGAG |
| | AATCTTTAAG | | CGCATCCTCA |
| 1742 | CCATCATAAGATGCCTTTTTACCGACAAG | 1798 | AAAGCATTATTTAGGCACTACAACTAGT |
| | TATAGTTGTACATGAAAAACGCTGTATTT | | ATAGTTGTACATGCCATTATCAGTCTCC |
| | TTTTATCCAT | | TTTACAAACG |
| 1743 | CCATCATAAGATGCCTTTTTACCGACGAG | 1799 | AAAGCATTATTTAGGCACTACAACTAGT |
| | TATAGTTGTACATGAAAAACGCTGTATTT | | ATAGTTGTACATGCCATTATCGGTCTCC |
| | TTTTATCCAT | | TTTACAAACG |
| 1744 | CCATCATAAGATGCCTTTTTACCGACGAG | 1800 | AAAGCATTATTTAGGCACTACAACTAGT |
| | TATAGTTGTACATGAAAAACGCTGTATTT | | ATAGTTGTACATGCCATTATCAGTCTCC |
| | TTTTATCCAT | | TTTACAAACG |
| 1745 | CTGAGTGGGCGAACTATTTATCTTTTACA | 1801 | AATAATATTTTTATCCTTATTGACATAT |
| | ATGCCAATCCCATGTATAATTAGGGGATA | | GAGGAAGCGGGTATAGCGGGAAGAAAGG |
| | AAAATAAAAA | | ACAAAATTTA |
| 1746 | GAAACTATGGGGATTATAGCGTTTGAGGG | 1802 | GAATAGCTTTTTGCCATATTGACATACT |
| | AGCAAGTGCGGTGTATAATTAAGGCATAA | | GCAAGTGCGGTTGGTAAGAGCACAACGT |
| | AATAAAAACTG | | GTCGTGAGTTA |
| 1747 | GAAGGGAATAATAGCTCTGTTTTGCCTGC | 1803 | GTGGAATTTTTAGTATTCATAACGGGCT |
| | TCCACAAACAACCAATCATGAATACTAAA | | ATTCAAACTGCCCAAATCAAATATTCCG |
| | ATTATCATAAA | | ACAGCCCTGGT |
| 1748 | GACCACAATCCGCGTGTGGGCTTTGTATC | 1804 | GAAGCCGTATAGTATAGGAATGGTGTCG |
| | CCTTGGGTGCCCGTAGGATAGCAAAAGTA | | CTTGGGTGCCCCAAGGCACTCGTCGATT |
| | TACTCATCGCT | | CGGAGCAGATC |
| 1749 | GCGAACGCCACTGCGGCCCCATCAGCAGC | 1805 | TTACTGCGGTGTACATTATTGCATGACT |
| | AATGAACAGTTATGTTATGATGTACACCA | | ACGAACAGTCAGTCGTACCACCGCCGAT |
| | CAGTTAATGGA | | ATCCACCACCA |
| 1750 | GCGAACGCCACTGCGGTCCCATCAGCAGC | 1806 | TTACTGCGGTGTACATTCTTGCATGACT |
| | AATGAACAGTTATGTTATGATGTACACCA | | ACGAACAGTCAGTCGTACCACCGCCGAT |
| | CAGTTAATGGA | | ATCCACCACCA |
| 1751 | GCTGCCGATCACCGAGATCGCGTTCGCGT | 1807 | CTCTCCTGAAGTGTCAGTTGAGCGCCTT |
| | CCGGCTTTCCGAGTGCGCGTGAACTACAG | | CGGTTTCGCCAGCGTGCGGCAGTTCAAC |
| | TTCTAGCATG | | GACACGATCC |
| 1752 | GGAAATTAATGAGCCGTTTGACCACTGAT | 1808 | CAGGGTTACTTTATACAACATTAATCTG |
| | CTTTTTGAAAATAAAGAGCAATGTTGTAC | | TATTTGAAATTTCGGAAGTGGCGCATCA |
| | ATCAAGATACA | | TGGTCCAGAAG |
| 1753 | GGAAATTAATGAGCCGTTTGACCACTGAT | 1809 | TAGTAATATTATATGCAACATTATTCTG |
| | CTTTTTGAAAATAAAGAGCAATGTTGTAC | | TATTTGAAATTTCGGAAGTGGCGCATCA |
| | ATCAAGATACA | | TGGTCCAGAAG |
| 1754 | GGTGAGGATGCGCTCGGAGTCGACCAGCG | 1810 | CGCTGAAAGCTAGTTTACTTTTCTATTC |
| | CCTTGGGGCACCCTAACGAAACCCATCCT | | GTTGGGGCATCCAAGACTGACGAAGCCG |
| | ATACTAGGGG | | ACTTTGGGAG |
| 1755 | GGTGAGGATGCGCTCGGAGTCGACCAGCG | 1811 | CGCTGAAAGCTAGTTTACTTTTCTATTC |
| | CCTTGGGGCACCCTAACGAAACCCATCCT | | GTTGGGGCATCCAAGACTGACGAAGCCG |
| | ATACTAGGGG | | ACTTTGGGAG |
| 1756 | GTCTTCTGGACCATGATGCGCTACTTCCG | 1812 | TGTATCTTGATGTACAACATTGCTCTTT |
| | AAATTTCAAATACAGAATAATGTTGCATA | | ATTTTCAAAAAGATCAGTGGTCAAACGG |
| | TAATATCACTA | | CTCATTAATTT |
| 1757 | GTGGATCACCTGGTTTTTCGTGTTCAGAT | 1813 | CTCCTTTTATTAGGGTTTGTGTCATCTA |
| | ACAGGCATGTAAAGTTTACATAAACCCTA | | CACACATACGAAGTGCTCCTGAGACAGA |
| | AAAAGATCGA | | AAGCGCATAT |
| 1758 | TAACACCAATTAAATGTTTAGTTCCCTCT | 1814 | GTCTTTATTTTTGGTATCCCGTTTCTTC |
| | TTGCGTCCAACGAGAGAAAACGAGGAACT | | TCCCTCCCTCATAGCTTGATCCGAAAAA |
| | AAACAATCTAA | | GTTACAGCTGG |
| 1759 | TAACACCAATTAAGTGTTTAGTTCCCTCT | 1815 | GTCTTTATTTTTGGTATCCCGTTTCTTC |
| | TTGCGTCCAACGAGAGAAAACGAGGAACT | | TCCCTCCCTCATAGCTTGAACCGAAAAA |
| | AAACAATCTAA | | GTTACAGCTGG |
| 1760 | TAACACCAATTAAGTGTTTAGTTCCCTCT | 1816 | ATGTTCTTTTTTGGTATCTCGTTTATTC |
| | TTGCGTCCAACGAGAGGAAACGAGGAACT | | TTCTTCCCTCATAGCTTGATCCGAAAAA |
| | AAACAATCTAA | | GTTACAGCTGG |
| 1761 | TAACACCAATTAAGTGTTTAGTTCCCTCT | 1817 | TGTTCTTTTTTTGGTATCTCGTTTCTTC |
| | TTGCGTCCAACGAGAGGAAATGAGGCACT | | TTCTTCCCTCATAGCTTGATCCGAAAAA |
| | AAACCAGTTGA | | GTTACAGCTGG |
| 1762 | TACAAAGTAGATGTCTTTTGTAGCCATTA | 1818 | CGTTCGTGCTTTGTCGTCACCTTGTTGG |
| | GGCGCATTAGGTTGACGCCAACAGGGTGA | | TGTAATTAGATTTACTCCATTAAGCCCC |
| | TGACAATATA | | AACGCATCAT |
| 1763 | TACCCGTTGCTTCGTTGTAGCAACACTAC | 1819 | TTTCTAAGCTTTTACAAGCAGAGCAACA |
| | GCACTCCACGTGTGGTGATAGGTCTTACC | | CACTCCACGTGATGCGTATTTGGAAATA |
| | CATATTATGGA | | AATCAGCCGGC |
| 1764 | TACCCGTTGCTTCGTTGTAGCAACACTAC | 1820 | TTTCTAAGCTTTTACAAGCAGAGCAACA |
| | GCACTCCACGTGTGGTGATAGGTCTTACC | | CACTCCACGTGATGCGTATTTGGAAATA |
| | CATATTATGGA | | AATCAGCCGGC |
| 1765 | TATCTTTTAACTGCAAGAGTACTACAGTT | 1821 | TCTACACGAGTAAGCAGACCTACACACT |
| | TCCACGTGCATTGACTGTCTACTTAGTAT | | CGATGTGAGCTGTTTGCGGGAACATATC |
| | CTTCCTACTAT | | GACGGGTTGCA |
| 1766 | TATCTTTTAACTGCAAGAGTACTACGGTT | 1822 | TCTTGGCGAGTGAGCAGACCTATACACT |
| | TCCACGTGCGTTGACTGTCTACTTAGTAT | | CGATGTGAGCTGTTTGCGGGAACATATC |
| | CTTCCTACTAT | | GACGGGTTGCA |
| 1767 | TATCTTTTAACTGCAAGAGTACTACGGTT | 1823 | TCCACACGTGTAAGCAGTCCTACACACT |
| | TCCACGTGCGTTGAGAGTACACTCTGTAT | | CGATGTGAGCTGTTTGCGGGAACATATC |
| | CTTCCTACTAT | | GACGGGTTGCA |
| 1768 | TATGCAACCCGTCGATATGTTCCCGCAAA | 1824 | ATAGTAGGAAGATACTAAGTAGACAGTC |
| | CAGCTCACATCGAGTGTATAGGTCTGCTC | | AACGCACGTGGAAACCGTAGTACTCTTG |
| | ACTCGCCAAGA | | CAGTTAAAAGA |
| 1769 | TATGCAACCCGTCGATATGTTCCCGCAAA | 1825 | ATAGTAGGAAGATACTAAGTAGACAGTC |
| | CAGCTCACATCGAGTGTATAGGTCTGCTC | | AACGCACGTGGAAACCGTAGTACTCTTG |
| | ACTCGCCAAGA | | CAGTTAAAAGA |
| 1770 | TCCCTTAGGTGCTAATAGCGCCACTAATT | 1826 | CCACACGTGTAAGCAGTCCTACACACTC |
| | CCACATGCGTTGAGAGTACACTCTGTATC | | GATGTGATGTGTTTGTGGGAATAAATCG |
| | TTCCTACTAT | | ACTGGTTGTA |
| 1771 | TCCCTTAGGTGCTAATAGCGCCACTAATT | 1827 | CCACACGTGTAAGCAGTCCTACACACTC |
| | CCACATGCGTTGAGAGTACACTCTGTATC | | GATGTGATGTGTTTGTGGGAATAAATCG |
| | TTCCTACTAT | | ACTGGTTGTA |
| 1772 | TCGGGGCACGGTATTGGTGATTCACGAGA | 1828 | TATTAGTTAGATGTCATAGACCGATTTA |
| | ACAAGGGACTGTAGGTTGATCTAGGACAC | | CAGCGGGCTCAACGACTGGGTTCGGTCC |
| | CTAACCAATA | | GTCGCGGGAC |
| 1773 | TTATTCTCTAATAAGTTTAACTACAGTCT | 1829 | GTGCTTTAGTCAACAATACTACGCTCTC |
| | CACAATGGCTCGGTTCTCCAATGACCAAC | | AACGTGTGGCGTATTTGGGAACATATCC |
| | CTATTCAACA | | ATACACTTAA |
| 1774 | TTATTCTCTAATAAGTTTAACTACAGTCT | 1830 | GTGCTTTAGTCAACAATACTACGCTCTC |
| | CACAATGGCTCGGTTCTCCAATGACCAAC | | AACGTGTGGCGTATTTGGGAACATATCC |
| | CTATTCAACA | | ATACACTTAA |
| 1775 | TTTAAATTTTGTCCTTTCTTCCCGCTATA | 1831 | TTTTTATTTTTATCCCCTAATTATACAT |
| | CCCACTTCCTCATATGTCAATAAGGATAA | | GGCATTGGCATTGTAAAAGATAAATAGT |
| | AAATATTATT | | TCGCCCACTC |
| 1944 | TAACACCAATTAAATGTTTAGTTCCCTCT | 1949 | GTCTTTATTTTTGGTATCCCGTTTCTTC |
| | TTGCGTCCAACGAGAGAAATCGAGGTACT | | TCCCTCCCTCATAGCTTGATCCGAAAAA |
| | AAACAAGCTAA | | GTTACAGCTGG |
| 1945 | ACAATCATCAGATAACTATGGCGGCACGT | 1950 | TTAATTTAGTATGGAAGTATGCACAATT |
| | GCATTAATGTATAATGTGTGTACTTCCAT | | GAGCAACCACGGTTGTATCCCGTCTAAA |
| | ATATTTATAC | | GTACTCGTAC |
| 1946 | AATGTTTGTAAAGGAGACTGATAATGGCA | 1951 | ATGGATAAAAAAATACAGCGTTTTTCAT |
| | TGTACAACTATACTAGTTGTAGTGCCTAA | | GTACAACTATACTCGTCGGTAAAAAGGC |
| | ATAATGCTTT | | ATCTTATGAT |
| 1947 | GTCTTCTGGACCATGATGCGCCACTTCCG | 1952 | TGTATCTTGATGTACAACATTGCTCTTT |
| | AAATTTCAAATACAGATTAATGTTGTATA | | ATTTTCAAAAAGATCAGTGGTCAAACGG |
| | AAGTAACCCTG | | CTCATTAATTT |
| 1948 | TTTAAATTTTGTCCTTTCTTCCCGCTATA | 1953 | TTTTTATTTTTATCCCCTAATTATACAT |
| | CCCGCTTCCTCATATGTCAATAAGGATAA | | GGCATTGGCATTGTAAAAGATAAATAGT |
| | AAATATTATT | | TCGCCCACTC |
| SEQ | | SEQ | |
| ID | | ID | |
| NO: | attB | NO: | attP |
| 1058 | TCTAACTCACGACACGTTGTACTCTTACC | 1389 | CAGTTTTTATTTTATGCCTTAATTATAC |
| | AACCGCACTTGCTCCCTCAAACGCTATAA | | ACCGCACTTGCGGTATGTCAATATGGCA |
| | TCCCCATAGTT | | AAAAGCTATTC |
| 1059 | CATTTTTACCTTGCTCTTCTCTCGAATTT | 1390 | AGTTTTATTTTTGTCTGTATAGGCTGTC |
| | CAGCATCTGCATGGCGCATAACATATTTA | | CGCATCTGCGGTATGCTTATAGGGACAA |
| | TGCGCTACAG | | AAATTATAAA |
| 1090 | ACAATCAACAAAGATGTATGGTGGTACAT | 1391 | TAACATATGTACGGAAGTATAGACACTC |
| | GCATTAATATCGGATGTATACCGACTAAA | | GATTAATATTTAATGTGTATACTTCCGT |
| | ACATTAATTC | | ATTTTTATTT |
| 1061 | TACAGACTTACATGGGACCATTCTATAGC | 1392 | TCAACTTTTAACCCTGTTTTAAGACCCA |
| | AGCTTTAAGATGCGTGAGGGACAAGATTA | | GTATTAAAATACTTAGCAATAAAACAGG |
| | CCAGACTCAG | | GGAATTGATA |
| 1062 | TGTAATTTCGGACACGAGTTCGACTCTCG | 1393 | TTGTATATTGCTAACAAAAGTTTAGCCT |
| | TCATCTCCACCAAAATATCAATATCCAAG | | CATCTCCACCATTTCTATCAATATACAT |
| | TCTTTGAATT | | AGGAAATAGT |
| 1063 | ATATGTTCCCGCAAACAGCACACGTTGAG | 1394 | TATCCCCTCCTCTCAAAACATGTAGAGA |
| | ACGGTAGTACTTTTGCAGTTAAAAGATAA | | CTGTAGTATTGATGTCAAGGGTTGATAA |
| | ATAAAGGACT | | GTAAGCGTGT |
| 1064 | TCGGCTTAGTGATGCCGAGTTCAGCTGGT | 1395 | TTTGCAATTGCTGGTGGTTCTGGTGCTT |
| | AAACCTTGGGTACTTGCTTCTCAGCTACT | | GGCCTTGGGCGATTGCGAGGTTTAAGGC |
| | TTCCCTCTTTT | | TTTCCACTTTT |
| 1065 | GTCTTCTGGACCATGATGCGCCACTTCTG | 1396 | TGTATCTTGATGTACAACATTGCTCTTT |
| | AAATTTCAAAAAGATCAGTGGTCAAACGG | | ATTTTCAAATACAGATTAATGTTGTATA |
| | CTCATTAATTT | | AAGTAGCCCTG |
| 1066 | CGGGCAAATTGCTGCCATATGGACCGGAG | 1397 | CTATTTATTAGATGTCTAAACAGTGCAT |
| | GCGGGACTTTAATTCCTTGGGCGCTTATT | | TACTACTCTACAACCTATATTAGACATC |
| | CCTGCCGCTGC | | TTATAAAAAGT |
| 1067 | TGATTTGATTGTATTGGATATTATGTTAC | 1398 | AATATAGTTGTATAAAAAGTCCTTTGCC |
| | CAGATGGCGAAGGTTATGATATTTGTAAA | | AGATGGCGAAGGACTTTTTGTACAACAA |
| | GAAATAAGAA | | AAAGTCACAA |
| 1068 | GCCCGTGGATTTGTTTCCAATGACGCATC | 1399 | CATAATATGGGTAAGACCTATCACCACA |
| | ACGTGGAGACGGTAGCACTTTTGTCCAAA | | TGTGGAGTGTGTTGCTCTGCTCGTAAAA |
| | CTTGATGTCGA | | GCCTAGAAACC |
| 1069 | GCTGGTGGTGGATATCGGCGGTGGTACGA | 1400 | TCCATTAACTGTGGTGCACATCATAACA |
| | CTGACTGTTCATTGCTGCTGATGGGGCCG | | TAACTGTTCGTAGTCATGCAAGAATGTA |
| | CAGTGGCGTTC | | CACCGCAGTAA |
| 1070 | GGAGGCTAAAACCTTTTTTGCCTGATAAT | 1401 | GGTGAAAATGTTGTAATAAGCGTCACAC |
| | CATACAAATAAGTGCCATTACAACAAATT | | ACTCAAATGTGTTATGCTTATACAAACA |
| | GCAGGTGTATC | | AAAATTAGAAG |
| 1071 | AGCTAAGTGTCCAAGCTGGCCCCCGATCC | 1402 | TACATAATTTCGTATATTAGATATTACC |
| | CAGTTTCAATAGTTTGGGGAATCTTTGTA | | AGTTTCAATTGGAAATACCTAATATACG |
| | AGTGGGAGAC | | AAAAAAGGCG |
| 1072 | ACAACAAAGACGCTAAGGTTTACGTGGTT | 1403 | AATTAAACTAAGATATTTAGATACGCTA |
| | AATGGAGACAGTCGTCAAGATATTACAGG | | CTCGAGACAAGAGTATCTAAATATCCTG |
| | TTCATTTACA | | TTTTTTTCGC |
| 1073 | CCCCAAAGTCGGCTTCGTCAGCCTTGGCT | 1404 | GAAGTATAGGGTTTATTTCATTGGGGTG |
| | GCCCGAAGGCCCTTGTTGATTCCGAGCGC | | CCCGAAGGCCCTCTGAAGTAAACTCTTA |
| | ATCCTCACCC | | TGACGCCCCG |
| 1074 | ATATCCCAAATGGAAAAGTTGTTAAACCG | 1405 | AAAAATTTAGTTGGTTATTGGTTACTGT |
| | TGTATAACGATACCAATCCCCCAACCTCC | | AACAAATCTTACGGTAACCAATAACCAA |
| | AAGTGGATAT | | CTTTAAAACT |
| 1075 | AACGTTTGTAAAGGAGACTGATAATGGCA | 1406 | ATGGATAAAAAAATACAGCGTTTTTCAT |
| | TGTACAACTATACTCGTCGGTAAAAAGGC | | GTACAACTATACTAGTTGTAGTGCCTAA |
| | ATCTTATGAT | | ATAATGCTTT |
| 1076 | GCCCAGGTGTGTCTGAGGTCATGGAAACG | 1407 | CGCAGGTTCGAATCCTGCAGGGCGCGCC |
| | GAAATCTTCCTCATTTATGCCCGTCTTAT | | ATTTCTTCAATTCCTGCACGACGACAAG |
| | CCGTTTCCGCT | | CTGATAGCCAT |
| 1077 | TAACACCAATTAAGTGTTTAGTTCCCTCT | 1408 | ATTTATAATTTTAGTTTCTCGTTTCTTC |
| | TTGCGTCCCTCATAGCTTGATCCGAAAAA | | TTCTTCCAACGAGAGAAAACGAGGAACT |
| | GTTACAGCTGG | | AAACAATCTAA |
| 1078 | CTGAGTGGGCGAACTATTTATCTTTTACA | 1409 | AATAATATTTTTATCCTTATTGACATAT |
| | ATGCCAAGCGGGTATAGCGGGAAGAAAGG | | GAGGAATGCCATGTATAATTAGGGGATA |
| | ACAAAATTTA | | AAAATAAAAA |
| 1079 | GAAACTATGGGGATTATAGCGTTTGAGGG | 1410 | GAATAACTTTTTGCCGTATTGACATACC |
| | AGCAAGTGCGGTTGGTAAGAGTAGCACGT | | GCAAGTGCGGTGTATAATTAAGGCATAA |
| | GTCGTGAATTA | | AATAAAAAACG |
| 1080 | CCGTCCCGCGACGGACCGAACCCAGTCGT | 1411 | TATTGGTTAGGTGTCCTAGATCAACCTA |
| | TGAGCCCCTTGTTCTCGTGAATCACCAAT | | CAGTCCGCTGTAAATCGGTCTATGACAT |
| | ACCGTGCCCC | | CTAACTAATA |
| 1081 | AGACTCAAAAACTGCAACCTTAAAGCTTT | 1412 | CTTCTTATTTAAACTAAGATATTTAGAT |
| | CACATTGCTTGAAAGCTTATTAACGCTAT | | ACATTGCTTGAGATAAGAGTATCTAAAA |
| | CAGTAACAAGT | | TTCACACTTTT |
| 1082 | GACGACGTCAAATGAGAAATCTGTTACAC | 1413 | TTTTTACAAAGAGGTATTTAGATACATG |
| | GTGTAACATTAGCAGTTAACCGCCGTTTT | | AGCTACAATGCCTGTATCTAAATACCTC |
| | AAATCGCAAAA | | TAAAGAAAGAC |
| 1083 | GTTAACAAGCACTTTAGACGGAATACAGC | 1414 | ACATAAATATATGGAAGTATACACACTA |
| | CATGGTTTATGCATGTACCGCCATAGCTT | | TACATTGGTTAATTGTGCATACTTCCAT |
| | TCTGTAAACT | | AAAATATTAA |
| 1084 | AGAACTGCGCTTTTTACAACAAGAGCATT | 1415 | TTTAGATTTTTCGTATTTACGATAACTT |
| | TTGTTTGTTTATATTTAAATACAAAAAAT | | TACATGTGTAAACATAACATAAATACTA |
| | CAAGTTATATA | | ATAAAATGTTA |
| 1085 | TATAGGCTGACATAAGTGTACTGTGGCGA | 1416 | TTTTCACTTCGTGTACATGGTGGAGTAT |
| | TTGTACTGATTCACTTCCCCATACCCAAA | | TAAACTGGTTTAACTCTCTACCATGTAC |
| | CATATTACAC | | ACTTTTTTTC |
| 1086 | TAAGGATAAGAAGGTTAAAGCATTTACAC | 1417 | TCTGAATATCAATAATTTTAGTAACCTT |
| | TTTTAGAGAGCCTTATTGTATTATCAGTA | | GATTGAAATCAAGGATAGTAAATTTCTT |
| | GTGGCATTTA | | TATATTTTCC |
| 1087 | ATTCCAACCATCACCAAGAACATCTTTAC | 1418 | AGATGCTCTCCCAGCTGAGCTAAACTCC |
| | TTCCAAGCTAAGCGACTTCCCTATCTCAC | | CTAGAGTTCGATACCATTTGAAAACACA |
| | AGGGGGCAAC | | GGAGAACGAG |
| 1088 | TCTGGCGGCAGTGCATTTCAAACACCATG | 1419 | TGTGCTCTTTTATTGTAGTTATATAGTG |
| | GTTTGGTCAATTGATGACTGGGCCACAGC | | TTTGGTCAATTAAACACAACCTAACTAC |
| | TTTTAGCTCA | | ATTAAATAAA |
| 1089 | TCCTAAGGGCTAATTGCAGGTTCGATTCC | 1420 | AATCCCCTGCCGCTTCAAGTAGATGTCT |
| | TGCAGGGGACACCAGATACCCTTCAAACG | | GCAGGGGACACCATTTATCAGTTCGCTC |
| | AAATCTACCTT | | CCATCCGTACC |
| 1090 | AAATAGAAAAATGAATCCGTTGAAGCCTG | 1421 | TAATGATTTTTAATGTTTCACGTTCAGC |
| | CTTTTTTATACTAACTTGAGCGAAACGGG | | TTTTTTATACTAAGTTGGCATTATAAAA |
| | AAGGTAAAAAG | | AAGCATTGCTT |
| 1091 | GACGAAATAGATATTTTTTGTGGCCATTA | 1422 | GATTTATGCTTTGTCGTCACCTTGTTGG |
| | AGCGCATTAGATTTACCCCATTTAATCCT | | TGTAATGAGGTTGTTACCAACAGGGTGA |
| | AAAGCATCAT | | TAACAAAGCT |
| 1092 | AACGAAGTAGATGTTTTTTGTTGCCATTA | 1423 | CGTTTATGCATTGTTGTCACCTTGTTGG |
| | GGCGCATTAGATTTACCCCATTTAATCCT | | TGTAATGAGGTTGACGACAACATGGTAG |
| | AATGCATCAT | | CGACAATATA |
| 1093 | AATATTAATAAGTTATATTGGGGGAACGT | 1424 | TTTTTTTACGTGAATGTTTTGTAACAAC |
| | GTGCGGTAGAAGTGGTACCATTCATGTCC | | TACAGTCTACCGCGTAACACACCATTCA |
| | TTACGAGATA | | TCAAAATTTA |
| 1094 | ATCGCTGTAGCGCATAAATACGTTATGAG | 1425 | GGTTTATAATTTTTGTCCCTATAAGCAT |
| | ACACGCAGATGCTGAAATTCGAGAAAAGA | | ACCGCAGATGCCGACAGACTATATAGAC |
| | GCAAAGTAAAG | | AAAAATAAAAC |
| 1095 | CATCTTTACTTTGCTCTTTTCTCGAATTT | 1426 | AGTTTTATTTTTGTCTATATTGGCTGTC |
| | CAGCATCTGCGTGTCTCATAACGTATTTA | | GGCATCTGCGGTATGCTTATAGGGACAA |
| | TGCGCTACAGC | | AAATTATAAAC |
| 1096 | ATCCCATGATGAGCCGAGATGACATAACC | 1427 | GTGGAAAATATAAAGAATTTTACTATCC |
| | CACCATTTCATTGAATGTCATTCTCTCAC | | TACATTTCAATTAAAGATACTAAATCTC |
| | CTTTATCAACC | | TTGATTTTTGA |
| 1097 | TCAAAAGTTAAGGGTTAAAGCATTTACGC | 1428 | CCTATTGAATGAGAGTTTTAGATACGCT |
| | TTTTAGAATGTTTGGTAGCATTGGTTACA | | TTTAGAATGTTTGGTATCTAAAACTCAC |
| | ATCACAGGAG | | GCTTTTTTGA |
| 1098 | GTTACTATAGCTCAGATGATTAAGGGACA | 1429 | AAACCATCAACAATTTTCCTCTGAGTGT |
| | CAGCCTAGGCTGTGTCCCTTAATTACGTA | | CATTTACTTCCCGTTTTTCCCGATTTGG |
| | AGCGTTGATA | | CTACATGACA |
| 1099 | GAATGATGCGTTGGGGCTTAATGGAGTAA | 1430 | TCTTTTGTCATCACCCTGTTGGCGTCAA |
| | ATCTAATGCGCCTAATGGCTACAAAAGAC | | CCTAATTACACCAACAAGGTGACGACAA |
| | ATCTACTTCG | | AGCATAAACG |
| 1100 | GGATCAAAAAGAACGACGATTCTTTAGTG | 1431 | TTTTCTTTTGTATCAAAATCAGTAGGAA |
| | TTTTTGATCCAACCATGGGTTCAGGTTCA | | CATAGAAATAATCTTACTGAGTTTAATA |
| | TTGATGTTAA | | CAATGCCGTG |
| 1101 | GGAAATTAATGAGCCGTTTGACCACTGAT | 1432 | CAGGGTTACTTTATACAACATTAATCTG |
| | CTTTTTGAAATTTCAGAAGTGGCGCATCA | | TATTTGAAAATAAAGAGCAATGTTGTAC |
| | TGGTCCAGAAG | | ATCAAGATGCA |
| 1102 | GTCTTCTGGACCATGATGCGCCACTTCCG | 1433 | TGTATCTTGATGTACAACATTGCTCTTT |
| | AAATTTCAAAAAGATCAGTGGTCAAACGG | | ATTTTCAAATACAGAATAATGTTGCATA |
| | CTCATTAATTT | | TAATATTACTA |
| 1103 | GTCTTCTGGACCATGATGCGCCACTTCCG | 1434 | TGTATCTTGATGTACAACATTGCTCTTT |
| | AAATTTCAAAAAGATCAGTGGTCAAACGG | | ATTTTCAAATACAGAATAATGTTGCATA |
| | CTCATTAATTT | | TAATATCACTA |
| 1104 | GTCTTCTGGACCATGATGCGCCACTTCCG | 1435 | TGTATCTTGATGTACAACATTGCTCTTT |
| | AAATTTCAAAAAGATCAGTGGTCAAACGG | | ATTTTCAAATACAGATTAATGTTGTATA |
| | CTCATTAATTT | | AAGTAACCCTG |
| 1105 | GTCTTCTGGACCATGATGCGCCACTTCCG | 1436 | TGTATCTTGATGTACAACATTACTCTTT |
| | AAATTTCAAAAAGATCAGTGGTCAAACGG | | ATTTTCAAATACAGAATAATGTTGCATA |
| | CTCATTAATTT | | TAATATTACTA |
| 1106 | ACAATCAACAAAGATGTATGGCGGTACAT | 1437 | TGATATAAGTACGGAAGTATAGACACTC |
| | GCATTAATATCGGATGTATACCGACTAAA | | GATTAATATTTAATGTGTATACTTCCGT |
| | ACATTAATTC | | ATTATTGTTT |
| 1107 | ATGAATTAATGTTTTAGTCGGTATACATC | 1438 | CTATAAAAATACGGAAGTATACACATTA |
| | CGATATTAATGCATGTACCGCCATACATC | | AATATTAATCAAGTGTCTATACTTCCGT |
| | TTTGTTGATT | | ACATAAGTTA |
| 1108 | ACAATCAACAAAGATGTATGGTGGTACAT | 1439 | TAACATATGTACGGAAGTATAGACACTT |
| | GCATTAATATCGGATGTATACCTACTAAA | | GATTAATATTTAATGTGTATACTTCCGT |
| | ACATTAATTC | | ATTTTTGTTT |
| 1109 | CTGTTTCAACAAATGATGCTCTTGGCCTT | 1440 | AAATACATATTCTCTTGTTGTCATCATG |
| | AATGGTGTAAACCTTATGCGTTTAATGGC | | TTGGTGTAAACCTAATTACACCAAGAGG |
| | GACAAAACATA | | ATGACGACAAA |
| 1110 | AGAAAAAGTGAATGTATTCACTGTTGGCT | 1441 | ATAATATAAAATACTGTTGTTCTATATG |
| | GGATTGGAGTTGCATGCACTCACCCTCCT | | GATTGGAGTTGCAACACAACTACAAATG |
| | ATGCTAAGTGT | | CAGTATAAAGG |
| 1111 | ATACGATTTCGGACAGGGGTTCGACTCCC | 1442 | AGCAGGGCGATCCTGAGTTTAATCTGGC |
| | CTCGCCTCCACCATTCAAATGAGCAAGTC | | TCGCCTCCACCAGCAAAGGTCACAATCG |
| | GTAAAAACATA | | TGTCGATGTCA |
| 1112 | AACCAGCTGTAACTTTTTCGGATCAAGCT | 1443 | TTAGATTGTTTAGTTCCTCGTTTCCTCT |
| | ATGAGGGACGCAAAGAGGGAACTAAACAC | | CGTTGGAAGAAGAATAAACGAGATACCA |
| | TTAATTGGTGT | | AAAAAGAACAT |
| 1113 | TATGCAACCCGTCGATATGTTCCCGCAAA | 1444 | ATAGTAGGAAGATACAGAGTGTACTCTC |
| | CAGCTCACGTGGAAACCGTAGTACTCTTG | | AACGCACATCGAGTGTGTAGGACTGCTT |
| | CAGTTAAAAGA | | ACACGTGTGGA |
| 1114 | TATCTTTTAACTGCAAGAGTACTACGGTT | 1445 | TCCACACGTGTAAGCAGTCCTACACACT |
| | TCCACGTGAGCTGTTTGCGGGAACATATC | | CGATGTGCGTTGAGAGTACACTCTGTAT |
| | GACGGGTTGCA | | CTTCCTACTAT |
| 1115 | AACCAGCTGTAACTTTTTCGGATCGAGTT | 1446 | TTAGATTATTTAGTACCTCGTTATCTCT |
| | ATGATGGACGTAAAGAGGGAACAAAGCAT | | CGCTGGAAGAAGAAGAAACGAGAAACTA |
| | CTAATAGGTGT | | AAATTATAAAT |
| 1116 | TTTTCCCCGAAAATCTTTAACACCGCTAT | 1447 | TATTTTGGTAGTTTATAGAAGTAATTTC |
| | CCGTTGATGTCCCAGCTCCTCCAAAGAAA | | AGTTGATGTTCACTCCATTAATTACCAA |
| | ACTAAATATT | | AATTTAAAAA |
| 1117 | GGATCAGAAGGTTAGGGGTTCGACTCCTC | 1448 | AAATTTGTTAGGGTAAAAAAGTCATAGT |
| | TTGGGTGCGCCATTTAAAAATAATAATAA | | TGGGTGCGCCATCGATTAACCCTAACTG |
| | GACTGTAGCCT | | ATAAATAAAAA |
| 1118 | TTTTCCCCCGAAAATCTTTAACACCACTA | 1449 | TTATTTTGGTAGTTTATAGAAGTAATTT |
| | TCTGTTGATGTCCCAGCTCCTCCAAAGAA | | CAGTTGATATTCACTCCATTAATTACCA |
| | AACTAAATAT | | AAAAAACAGG |
| 1119 | GTAAACTAAAATATGCCCAGACCCCATTG | 1450 | TATGGAATTGTATCAATCTCGGCGTGGT |
| | CGTTATCGATAATTTTTAGTTCTTCTGGT | | TTTGTCCGTTGCCACTCTGAAATTGATA |
| | TTTAAATTAC | | CAATGTAACA |
| 1120 | GTAAACTAAAATATGCCCAGACCCCATTG | 1451 | TATGGAATTGTATCAATCTCGGCGTGGT |
| | CGTTATCGATAATTTTTAGTTCTTCTGGT | | TTTGTCCGTTGCCACTCTGAAATTGATA |
| | TTTAAATTAC | | CAATGTAACA |
| 1121 | CTTGTGGATCACCTGGTTTTTCGTGTTCA | 1452 | TGTCTCTTTTTATTAGGGTTTATATCAA |
| | GATACACACATACGAAGTGCTCCTGAGAG | | CTACACACATGTAAAGTAGACATAAACA |
| | AGAAAGCGCAT | | GCAAAAATTTG |
| 1122 | GAAGGCAGACCATTAACAGGAAGGGATGG | 1453 | TAAAGATCGTAAAAAAGAAATAGAGTTC |
| | AGCATTTGACCTTACCCAGAAAAAGTGGA | | CGAATTACACCATTTATAAAAAAGCTGC |
| | GAGAAAGAAA | | TGGAGGCAAG |
| 1123 | GGAAATTAATGAGCCGTTTGACCACTGAT | 1454 | TAGTAATATTATATGCAACATTATTCTG |
| | CTTTTTGAAATTTCGGAAGTGGCGCATCA | | TATTTGAAAATAAAGAGCAATGTTGTAC |
| | TGGTCCAGAAG | | ATCAAGATACA |
| 1124 | GTCTTCTGGACCATGATGCGCCACTTCCG | 1455 | TGTGTCTTGATGTACAACATTACTCTTT |
| | AAATTTCAAAAAGATCAGTGGTCAAACGG | | ATTTTCAAATACAGAATAATGTTGCATA |
| | CTCATTAATTT | | TAATATTACTA |
| 1125 | GCTTCTGCTTGGATTTTACGCCATCCAGC | 1456 | TTCATTATTTTAATAGAGATAGAAATCA |
| | CAATATGCAAGTGATCGCCGGTACGATGA | | ACCATGCACATGGTAGCATGAGTGTTCT |
| | ACGTAGGGCGA | | ATGAAAAAAGA |
| 1126 | GTCTTCTGGACCATGATGCGCCACTTCCG | 1457 | TGTATCTTGATGTACAACATTACTCTTT |
| | AAATTTCAAAAAGATCAGTGGTCAAACGG | | ATTTTCAAATACAGAATAATGTTGCATA |
| | CTCATTAATTT | | TAATATTACTA |
| 1127 | AGCTTTTATTGCAAGAAAAATGGGTTATA | 1458 | TATTTATATAAAATAGTGTTTTTGTAAA |
| | AGTACACATCAGGTTATAGTAATATCGAA | | GTACACATCACCATATTTGACAAAAAAC |
| | AAAGGAAGCG | | CTATAAATAA |
| 1128 | AACCAGCTGTAACTTTTTCGGATCGAGTT | 1459 | TTAGATTGTTTAGTATCTCGTTATCTCT |
| | ATGATGGACGTAAAGAGGGAACAAAGCAT | | CGTTGGAGGGAGAAGAAACGGGATACCA |
| | CTAATAGGTGT | | AAAATAAAGAC |
| 1129 | ACGTTTGTAAAGGAGACTGATAATGGCAT | 1460 | TGGATAAAAAAATACAGCGTTTTTCATG |
| | GTACAACTATACTCGTCGGTAAAAAGGCA | | TACAACTATACTCGTTGTAGTGCCTAAA |
| | TCTTATGATGG | | TAATGCTTTTA |
| 1130 | ACAATCATCAGATAACTATGGCGGCACGT | 1461 | TTAATAAACTATGGAAGTATGTACAGTC |
| | GCATTAACCACGGTTGTATCCCGTCTAAA | | TTGCAATGTTGAGTGAACAAACTTCCAT |
| | GTACTCGTAC | | AATAAAATAA |
| 1131 | AACAATCTGCAAACATGTATGGCGGTACA | 1462 | TTAATTTTTGTACGGAAGTAGATACTAT |
| | TGTATCAACATTGGTTGTATTCCTACAAA | | CTTTCAATATCCATGTTACTTAGTGCCA |
| | GACACTCATT | | TACAAAAACC |
| 1132 | ACAGCCTGTGGATATGTTTGCACAGACTG | 1463 | GTCTTTTTACCTTATATAACAGTTTCAT |
| | CTCACGTGGAGTGTGTAGTTAAGCTAATC | | GCACGTGGAGACGGTAGTATTGATGTCA |
| | AAGGTAAATCA | | CGAAAAGAAAA |
| 1133 | CGAGACGAGAAACGTTCCGTCCGTCTGGG | 1464 | TGTTATAAACCTGTGTGAGAGTTAAGTT |
| | TCAGTTGGGCAAAGTTGATGACCGGGTCG | | TACATGCCTAACCTTAACTTTTACGCAG |
| | TCCGTTCCTT | | GTTCAGCTTA |
| 1134 | ATTCTCCTTTAACGAATGAAGCGACTAAT | 1465 | TTGACTTTTGACATCAATACTACGCACT |
| | TCGATATGATGGGTTTGCGGGAAAAGATC | | CCACATGGCTTGAGAGGACAGAATGAAT |
| | TACAGGCTGAA | | GTCATTTGAGT |
| 1135 | CAGCCGGCTGATTTATTTCCAAATACGCA | 1466 | TCCATAATATGGGTAAGACCTATCACCA |
| | TCACGTGGAGTGCGTAGTGTTGCTACAAC | | CACGTGGAGTGTGTTGCTCTGCTTGTAA |
| | GAAGCAACGGG | | AAGCTTAGAAA |
| 1136 | TATGCAACCCGTCGATATGTTCCCGCAAA | 1467 | ATAGTAGGAAGATACAGAGTGTACTCTC |
| | CAGCTCACGTGGAAACCGTAGTACTCTTG | | AACGCACATCGAGTGTGTAGGACTGCTT |
| | CAGTTAAAAGA | | ACACGTGTGGA |
| 1137 | AACAGAAGAAGGGAAGTTCTACCTATTGA | 1468 | CCGAAGCATCGTATCAATGCTTCGGTCA |
| | TACCTTTGGTGGAGCTGAGGAGACGATAT | | ATGTTTGGCAAAGGGCACGAGTTTGATA |
| | CTAGAACCGAT | | CAAAATGCACC |
| 1138 | AACAGAAGAAGGGAAGTTCTACCTATTGA | 1469 | CCGAAGCATCGTATCAATGCTTCGGTCA |
| | TACCTTTGGTGGAGCTGAGGAGACGATAT | | ATGTTTGGCAAAGGGCACGAGTTTGATA |
| | CTAGAACCGAT | | CAAAATGCACC |
| 1139 | AACAGAAGAAGGGAAGTTCTACCTATTGA | 1470 | CCGAAGCATCGTATCAATGCTTCGGTCA |
| | TACCTTTGGTGGAGCTGAGGAGACGATAT | | ATGTTTGGCAAAGGGCACGAGTTTGATA |
| | CTAGAACCGAT | | CAAAATGCACC |
| 1140 | GTCTCGCTCGCCCACCGCGGGGTGCTCTT | 1471 | GTAGCCACTTGTTTTACACGTCTTGTCT |
| | TCTGGACGAGGCCCCGGAGTTCTCGGGGA | | CTGGACGAGGCATGTAAAACAGGTGGGC |
| | AGGCGCTGGAC | | TTGATCAGCTA |
| 1141 | CACTACAGTATGCAGATTTTGCAGCTTGG | 1472 | TATGATAATTTTAGTATTCATGATTGGT |
| | CAGCGTGAATGGCTACAAGGTGAGGCGTT | | TGTTTGAATAGCCCGTTATGAATACTAA |
| | AGAGCAACAGC | | AAATTCCACTC |
| 1142 | TCATCACTACTTAATATATCCATAAGAGA | 1473 | ACCCTTAAACATATAACATGTTTAAGGG |
| | AATTTCATTTCCTTCTTTGTCTACTCCTA | | TATTCATTACCCACTTCATGTTGTATGT |
| | TAGGATCTTG | | TATGTAAAAA |
| 1143 | TCTGGTGGCAGTGCATTTCAAACACCGTG | 1474 | TGTGCTCTTTTGTTGTATTTATATGGCG |
| | GTTTGGTCAATTGATGACTGGGCCACAGC | | TTTGGTCAATTAAACACAACCTAACTAC |
| | TTTTAGCTCA | | ATCAAATGAA |
| 1144 | GTTTTTTGTAGCCATTAGGCGCATGAGGT | 1475 | GTCGTCACCTTGTTGGTGTAATTAGATT |
| | TTACGCCATTAAGCCCTAAAGCGTCATTC | | AACCCCAACAGGGTGATAACAAAAGAAG |
| | GTCGAAACAGC | | GATTTTTTAAT |
| 1145 | GATCACCCAGGACGTCTGCGCCTTCTACG | 1476 | CCTGTATTGTGCTACTTAGAGCATAAGG |
| | AGGACCATGCCCTCTACGACGCCTACACG | | CGACCATGCCTTACAAGCTCAAAATAGC |
| | GGCGTGGTGGT | | ACACGTTTCCG |
| 1146 | GCAACCGGCATCAGTGTAATACCGATAAT | 1477 | CAAATAATGTAGTACCCAAATTAAGTTT |
| | CGTAACAACAGAGCCTGTCACGACCGGCG | | CACACAAGCAACCTTAATCGGGTACTAC |
| | GAAAAAACGA | | TTAATATCTA |
| 1147 | GTGAGGATGCGCTCGGAGTCGACCAGCGC | 1478 | TCTGAGAATTAGTATATTTTCCTATTCG |
| | CTTGGGGCATCCAAGACTGACGAAGCCGA | | CAGGGGCACCCTAACGAAACCCATCCTA |
| | CTTTGGGAGT | | TACTAGGGGC |
| 1148 | ACAAGACCCCATCGGAACAGATAAAGAAG | 1479 | ATACCAATAACATATAAAGAGTAGTGTG |
| | GTAATGAAATAAGTCTTTTAGATATACTT | | TAATGAAATAAACACTACTATTTATATG |
| | GGCACAGAGG | | TTATTTTCTA |
| 1149 | GCTGGTGGTGGATATCGGCGGTGGTACGA | 1480 | TCCATTAACTGTGGTGTACATCATAACA |
| | CTGACTGTTCATTGCTGCTGATGGGGCCG | | TAACTGTTCGTAGTCATGCAAGAATGTA |
| | CAGTGGCGTTC | | CACCGCAGTAA |
| 1150 | CCATCATAAGATGCCTTTTTACCGACGAG | 1481 | AAAGCATTATTTAGGCACTACAACTAGT |
| | TATAGTTGTACATGCCATTATCAGTCTCC | | ATAGTTGTACATGAAAAACGCTGTATTT |
| | TTTACAAACG | | TTTTATCCAT |
| 1151 | CCACTCCCAAAGTCGGCTTCGTCAGTCTT | 1482 | GCCCCTAGTATAGGATGGGTTTCGTTAG |
| | GGATGCCCCAAGGCGCTGGTCGACTCCGA | | GGTGCCCCTACGAATAGAAAAATATACT |
| | GCGCATCCTC | | AATTCTCAGG |
| 1152 | CACTCCCAAAGTCGGCTTCGTCAGTCTTG | 1483 | CCCCCAGTGTAGGATTTATATCACTAGG |
| | GATGCCCCAAGGCGCTGGTCGACTCCGAG | | TTGCCCCAACGAATAGAAAAGTAAACTA |
| | CGCATCCTCA | | GCTTTCAGCG |
| 1153 | ACCAGCTGTAACTTTTTCGGATCAAGCTA | 1484 | TAGATTGTTTAGTATCTCATTATCTCTC |
| | TGAGGGACGCAAAGAGGGAACTAAACACT | | GTTGGACGGAGACGAATCGAGAAACTAA |
| | TAATTGGTGTT | | AATTATAAATA |
| 1154 | AGTTCAGCCCGTGGATTTGTTTCCAATGA | 1485 | TCGTTCCATAATATGGGTAAGACCTATC |
| | CGCATCATGTGGAGTGCATAGCGTTGATA | | ACCACACATCGAGTGTGTGGTTCTGCTC |
| | CAAAGAGTGA | | GTAAAAGCCT |
| 1155 | AGAAATCACTCAGCAAGAGTTAGCCAGGC | 1486 | CCCCCTCGTGTTATTGTGGGTACATGAT |
| | GAATTGGCAAACCTAAACAGGAGATTACT | | ATTTGGCAACCCGAATGTAGTCAACCCA |
| | CGCCTATTTAA | | AAATAACTAAA |
| 1156 | CAGCCGACTGATTTGTTTCCGAATACGCA | 1487 | ATATGACATCAATGCCATCAACTCGAGC |
| | TCACGTGGAGTGCGTAGTGTTGCTACAAC | | CACGTGGAGTGTGTGGTTCTGCTCGTAA |
| | GAAGCAACGGG | | AAGCCTAGAAA |
| 1157 | GTCTTCTGGACCATGATGCGCCACTTCTG | 1488 | TGTATCTTGATGTACAACATTGCTCTTT |
| | AAATTTCAAAAAGATCAGTGGTCAAACGG | | ATTTTCAAATACAGATTAATGTTGTATA |
| | CTCATTAATTT | | AAGTAGCCCTG |
| 1158 | TGATTTGATTGTATTGGATATTATGTTAC | 1489 | AATATAGTTGTATAAAAAGTCCTTTGCC |
| | CAGATGGCGAAGGTTATGATATTTGTAAA | | AGATGGCGAAGGACTTTTTGTACAACAA |
| | GAAATAAGAA | | AAAGTCACAA |
| 1159 | AAAATGTGTAGACATGTTTCCTTATACGA | 1490 | CGAAAGACATCAATACTGTCCTCTCGAG |
| | CACATGTTGAGACGGTAGTGTTAATGGAG | | CCATGTTGAGTGCGTCACATTGATGTCA |
| | AGAAAGTAAGA | | AGGGTTTAGAA |
| 1160 | AATAACAAACTATTTTTTATAGAAACATG | 1491 | AAAGAAAAAATTCTTTATTTCTACATAC |
| | GGGATGTCAGATGAATGAAGAGGATTCCG | | GGTTGTCCGTATGTAGAAAATAGTAGGA |
| | AAAAATTATC | | ATATATGAGA |
| 1161 | TAACACCAATTAAGTGTTTAGTTCCCTCT | 1492 | CTTTATTTTTTTTGTATCCCATTTCCTC |
| | TTGCGTCCCTCATAGCTTGATCCGAAAAA | | TCCCTCCAACGAGAGGAAATGAGGCACT |
| | GTTACAGCTGG | | AAACCAGTTGA |
| 1162 | TAACACCAATTAAGTGTTTAGTTCCCTCT | 1493 | TGTTCTTTTTTTGGTATCTCGTTTCTTC |
| | TTGCGTCCCTCATAGCTTGATCCGAAAAA | | TTCTTCCAACGAGAGAAAACGAGGTACT |
| | GTTACAGCTGG | | AAATAAGCTAA |
| 1163 | TAACACCAATTAAATGTTTAGTTCCCTCT | 1494 | TGTTCTTTTTTTGGTATCTCGTTTCTTC |
| | TTGCGTCCCTCATAGCTTGATCCGAAAAA | | TTCTTCCAACGAGAGAAAACGAGGTACT |
| | GTTACAGCTGG | | AAATAAGCTAA |
| 1164 | GGTGAGGATGCGCTCGGAGTCGACCAGCG | 1495 | CTTAAAGATTGAGTTTACTTTTGCAGTC |
| | CCTTGGGGCATCCAAGACTGACGAAGCCG | | ATTGGGGCACCCTAACGAAACCCATCCT |
| | ACTTTGGGAG | | ATACTAGGGG |
| 1165 | TTTATCCCGTAAGGACATGAATGGTACCA | 1496 | TAAATTTTGATGAATGGTGTGTTACGCG |
| | CTTCTACCGCACACGTTCCCCCAATATAA | | GTAGACTGTAGTTGTTACAAAACATTCA |
| | CTTATTAATA | | CGTAAAAAAA |
| 1166 | TATCCCGTAAGGACATGAATGGTACCACT | 1497 | AATATTAATGAGTGTTATGTAACTAGAA |
| | TCTACCGCACACGTTCCCCCAATATAACT | | AGACCGCAATAGTTACAAAACATTCATT |
| | TATTAATATT | | AAAAATAACC |
| 1167 | GGATCAAAAAGAACGACGATTCTTTAGTG | 1498 | TTTTCTTTTGTATCAAAATCAGTAGGAA |
| | TTTTTGATCCAACCATGGGTTCAGGTTCA | | CATAGAAATAATCTTACTGAGTTTAATA |
| | TTGATGTTAA | | CAATGCCGTG |
| 1168 | CACTCCCAAAGTCGGCTTCGTCAGTCTTG | 1499 | CCCCTAGTATAGGATGGGTTTCGTTAGG |
| | GATGCCCCAAGGCGCTGGTCGACTCCGAG | | GTGCCCCAATGATTGCAAAAGTAAACTC |
| | CGCATCCTCA | | AATCTTTAAG |
| 1169 | GTGGATCACCTGGTTTTTCGTGTTCAGAT | 1500 | CTCTTTTTATTAGGGTTTATATCAACTA |
| | ACAGGCATACGAAGTGCTCCTGAGACAGA | | TACACATGTAAAGTAGACATAAACAGCA |
| | AAGCGCATATC | | AAAATTTGATA |
| 1170 | TCTATTTAAATTGTCTATTTTATTGACAG | 1501 | AAGATATTACCCTGAATGAAGTCTTACG |
| | GGGACCAAATTGAAGTGGCCGCTAATCAG | | TCGTCAATCTCTGCTAAGATTACCAAAT |
| | TTCCTTCAAAA | | AACCCCGACAA |
| 1171 | TCTATTTAAATTGTCTATTTTATTGACAG | 1502 | AAGATATTACCCTGAATGAAGTCTTACG |
| | GGGACCAAATTGAAGTGGCCGCTAATCAG | | TCGTCAATCTCTGCTAAGATTACCAAAT |
| | TTCCTTCAAAA | | AACCCCGACAA |
| 1172 | CCGAGCTGCCGATCACCGAGATCGCGTTC | 1503 | TGGCCTCTCCTGAAGTGTCAGTTGAGCG |
| | GCGTCCGGTTTCGCCAGCGTGCGGCAGTT | | CCTTCGGCTTTCCGAGTGCGCGTGAACT |
| | CAACGACACGA | | ACAGTTCTAGC |
| 1173 | GATCACCCAGGACGTCTGCGCCTTCTACG | 1504 | CCTGTATTGTGCTACTTAGAGCATAAGG |
| | AGGACCATGCCCTCTACGACGCCTACACG | | CGACCATGCCTTACAAGCTCAAAATAGC |
| | GGCGTGGTGGT | | ACACGTTTCCG |
| 1174 | ACCAGCTGTAACTTTTTCGGATCAAGCTA | 1505 | TACGTTGTTTAGTACCTCAATTTCTCTC |
| | TGAGGGACGCAAAGAGGGAACTAAACACT | | TCTGGACGGAGACGAATCGAGAAACTAA |
| | TAATTGGTGTT | | AATTATAAATA |
| 1175 | ACTGGCGAAGCGATTCTTGGTGCGAACAT | 1506 | AAACCCATTTTTACCTTATGTAAAAAAA |
| | TTTCCGTGATTTTTTTGCGGGCATCCGTG | | TCACGTGATATGTTTACCAAATGACAAA |
| | ATGTGGTCGGC | | AATGATATAAT |
| 1176 | TTCTAACTCACGACACGTTGTGCTCTTAC | 1507 | GGTTTTTTATTTGTATGCCATAATTATA |
| | CAACCGCACTCGCTCCCTCAAACGCTATA | | CACCGCACTTGCGGTATGTCAATAAGAC |
| | ATCCCCATAG | | ATACGAATTT |
| 1177 | GGTGAGGATGCGCTCGGAGTCGACCAGCG | 1508 | CTTAAAGATTGAGTTTACTTTTGCAGTC |
| | CCTTGGGGCATCCAAGACTGACGAAGCCG | | ATTGGGGCACCCTAACGAAACCCATCCT |
| | ACTTTGGGAG | | ATACTAGGGA |
| 1178 | GCTGTGGCGGTTCCAAATTGGTGAGGCGC | 1509 | AACGTGCCTTTGTCGCAGCTGCCAAAGT |
| | CAAATCCGACGTCCCCCCATCCTGAGTAG | | TTAGCCGCTCAACTTGGTGGCGACCGAT |
| | CAGTCGGGTTT | | GCCTGCGGTCA |
| 1179 | AAAATCTAAATTTTCTTTTGGCAGACCTT | 1510 | CCTTTAATTTTTGGGTTAAAGGAACATT |
| | CTTCGCTACTCGTAATATTACCTAACACG | | GACTCTAGTGAGTGTTATATTAACCCAA |
| | GAACGAAATAA | | AAAGAGCCTAC |
| 1180 | TACAGACTTACATGGGACCATTCTATAGC | 1511 | TCAACTTTTAACCCTGTTTTAAGACCCA |
| | AGCTTTAAGATGCGTGAGGGACAAGATTA | | GTATTAAAATACTTAGCAATAAAACAGG |
| | CCAGACTCAG | | GGAATTGATA |
| 1181 | ATCACGATGGGGAGCAGTTCGATGTACCC | 1512 | TCCGTGATAGGCCGCGTGGCGTCGCCTC |
| | CATCTCCAGGTCCTTCACCACATAGTCCG | | AGCACCACCACTTACCCAAAACCCAACC |
| | CCGCCCCCTGC | | CTTATCGGTTG |
| 1182 | GGTTAAGTGTATGGATATGTTCCCAAATA | 1513 | ACTCAAATGACATTCATTCTGTCCTCTC |
| | CTCCACATTGTGAGACGTGCGTACTTTTG | | AAGCCACGTTGAGTGCGTAGTATTGATG |
| | TCCCACAAAA | | TCAAGGGTTG |
| 1183 | AACCAGCTGTAACTTTTTCGGATCAAGCT | 1514 | TCAACTGGTTTAGTGCCTCATTTCCTCT |
| | ATGAGGGACGCAAAGAGGGAACTAAACAC | | CGTTGGAAGAAGAAGAAACGAGATACCA |
| | TTAATTGGTGT | | AAAAAAGAACA |
| 1184 | CGTTTATGAATGACTTGATTTTTGGTATG | 1515 | AGACATTCATTTTTATTAGGGTTTATGT |
| | TAAAGTATAAGCAGACAAAATGCTCCTGG | | AAAGTATAAGCATGTAAACTTAACATAA |
| | GATAAAAAGC | | ATACAAATAA |
| 1185 | TCTTCAAGATCCAATAGGAATAGATAAAG | 1516 | AACATTTTACAAGTATATAACATGTAAT |
| | AAGGCAATGAAATCTCTTTAATGGATGTT | | AGGCAATGAATTACCCTGGACAAGTTGT |
| | TTAGGTACAG | | CAGTCTAGGG |
| 1186 | AACAGTTCCTTTTTCAATGTTACTGTAAC | 1517 | TTATTTATAGGTTTTTTGTCAAATACGG |
| | CTGATGTGTACCTATAGCCCATCCGTCGC | | TGATGTGTACTTTACAAAAACACTATTT |
| | GCAATGAAAG | | TATATAAATA |
| 1187 | GGGGCAAATTGCTGCGATTTGGGTTGGAG | 1518 | AGAATAATTATATGTCTTCTATTGGCGG |
| | GGGGAACGTTGATTCCATGGGCGCTCATT | | TAATACCCCAGCATAGACAATATACATA |
| | CCAGCTGCTG | | TAATCTTTCT |
| 1188 | GTCTTCTGGACCATGATGCGCCACTTCCG | 1519 | TGTATCTTGATGTACAACATTGCTCTTT |
| | AAATTTCAAAAAGATCAGTGGTCAAACGG | | ATTTTCAAATACAGAATAATGTTGCATA |
| | CTCATTAATTT | | TAATATTACTA |
| 1189 | ATGAATTAATGTTTTAGTCGGTATACATC | 1520 | GGTTATTTTTACGGAAGTATACACATTA |
| | CGATATTAATGCATGTACCGCCATACATC | | AATATTAATCAGGTGTCTATACTTCCGT |
| | TTTGTTGATT | | ACATATGTTA |
| 1190 | GATGTTCGTAGCAACTATGGGAGGAACCG | 1521 | GGTTTTTATATGTGCGTTATGTAACAAG |
| | GTGCAACATTAGTTGTTCCATTTATGTTT | | CACCACGGCTATAGTTACATAACCCACA |
| | ATGTGGTTAA | | TTAAAATATA |
| 1191 | ATGAATTAATGTTTTAGTCGGTATACATC | 1522 | TTATTTTTTTACGGAAGTATACACAATA |
| | CGATATTAATGCATGTACCGCCATACATC | | AATATTAATAGAGTGTCTATACTTCCGT |
| | TTTGTTGATT | | ACATATGTTA |
| 1192 | ACAGTTTACAGAAAGCTATGGCGGTACAT | 1523 | TTGATATTTTATGGAAGTATGCACAATT |
| | GCATAAACCATGGCTGTATTCCGTCTAAA | | AACCAATGTATAGTGTGTGTACTTCCAT |
| | GTGCTTGTTA | | ATATTTATGC |
| 1193 | ATAGAAGCACACTGATGATGAGCAAGACC | 1524 | AATTGGAAAATATAAATAATTTTAGTAA |
| | ACCAACATTTCCACAAGTGTGAAAGCTTT | | CCTACATCTCAATAAAGGATAGTAAAAT |
| | AACCTTAGCT | | TATTGATTTT |
| 1194 | ACCAGCTGTAACTTTTTCGGATCAAGCTA | 1525 | TACGTTGTTTAGTACCTCAATTTCTCTC |
| | TGAGGGACGCAAAGAGGGAACTAAACACT | | TCTGGACGGAGACGAATCGAGAAACTAA |
| | TAATTGGTGTT | | AATTATAAATA |
| 1195 | GGATTTCGTTGCACTGATGGGCGGTACTG | 1526 | CTCTTTTTTATGTATGGTTTGTAACAAT |
| | GCGCGACTTTACTCGTTCCTTATTTATTT | | ATCCACCTACAAAGTGCTAAACCATACA |
| | ATATTTCTTT | | TGTTAAAAAT |
| 1196 | GGATTTCATTGCACTGATGGGCGGTACTG | 1527 | TCTTTTTTTATGTATGGTTTGTAACAAT |
| | GCGCGACTTTACTCGTTCCTTATTTATTT | | ATCCACCTACAAAGTGCTAAACCATACA |
| | ATATTTCTTT | | TGTTAAAAAT |
| 1197 | TATATGTCTTCATATAATCGAGCAATGTG | 1528 | TTAGGGTTACCATTGATCATGAAGACCA |
| | TTCAGATAGTTGAGTCCGTATAATTGTGT | | TTATATCATCCAGCTCATAGTATTTTGT |
| | AAAAAGCTAG | | CTCTTTCTTT |
| 1198 | GCGCGCCGACTTTATGCAGGATCACATTG | 1529 | TTCAAGTCTAGGATACGAACAGTACGTT |
| | CTGGGCACTTCGAACAGAAAGTAGCCGAG | | TGCGCACACGATAACGTGCCGTTCGTAA |
| | GAAGAAGATG | | ACCGACGAGC |
| 1199 | TTCGTTAATTGGAGCTACGGCCATTGGTG | 1530 | AGATGTGATGTTAATTATTCTGGTCAGT |
| | GACCTCCTGACCACCCCCACTCGTAAGTC | | ACCTCCTGACCGGATTAATTAATATCAC |
| | ATAATAATTAC | | TAGGAAATGGC |
| 1200 | TAATGCATACATTGTCGTTGTCTTCCCAG | 1531 | TTAATATCAGTTGTATTTATACTACTAG |
| | AACCAGTCGGTCCAGTAAACACGAGTAGC | | CTCTGTAGCTAACGTTATATAAATACAC |
| | CCCTGTGAAT | | TTAAAATAAA |
| 1201 | GCTCTGCAAAAGCTTGATCGTCGGTTCAA | 1532 | AAACCCTTGATATACCAATAGTTTCAAA |
| | ATCCGTCTACCGCCTTTTAATATTCTAAA | | TCCGTCTACCGCCTTTATTATAGGATTT |
| | AAACCTAGGA | | TGTCCGAATT |
| 1202 | ACAATCATCAGATAACTATGGCGGCACGT | 1533 | TTAATTTAGTATGGAAGTATGCACAATT |
| | GCATTAACCACGGTTGTATCCCGTCTAAA | | GAGCAATGTATAATGTGTGTACTTCCAT |
| | GTACTCGTAC | | ATATTTATAC |
| 1203 | ATGTACGAGTACTTTAGACGGGATACAAC | 1534 | GTATAAATATATGGAAGTACACACATTA |
| | CGTGGTTAATGCACGTGCCGCCATAGTTA | | TACATTGCTCAATTGTGTATACTTCCAT |
| | TCTGATGATT | | ACTAAATTAA |
| 1204 | ATGAAGATTATAATAATTGGAGGTGGCTG | 1535 | TCACGTGTTTTAATGGAGTTTTAACTGG |
| | GTCTGGATGTGCAGCAGCCATAACAGCTA | | TCTGGATGTGCAGCACAGGTAAAACTAC |
| | AAAAGGCAGGT | | ACTAATTATTA |
| 1205 | AACCCCAAAGTCGGCTTCGTCAGCCTTGG | 1536 | TAGAAGTATAGGGTTTGTTTCATTGGGG |
| | CTGCCCGAAGGCCCTCGTCGATTCCGAGC | | TGCCCGAAGGATGGTTGAGATATACTTT |
| | GCATCCTCAC | | TGGCGAGCAG |
| 1206 | GAATCTAAATTTTCTTTCGGTAATCCTTC | 1537 | CTTTAATTTTTGGGTTAAAGGAACATTG |
| | TTCACTACTCGTAATATTTCCTAATACAG | | ACTCTACTAAGTGTTATATTAACCCAAA |
| | AACGAAATAAA | | AAAGAGCCTTC |
| 1207 | CTGGCTTGATTAATAGTTTAAAAGTCTTG | 1538 | TCCTGAATGGTTACTACGATTGGTTTGG |
| | GCTGGTGTCACGAACGGTGCAATAGTGAT | | TTGGTGTTATTGCTGTGAATAAAGTTGT |
| | CCACACCCAAC | | TGGTGTAACCA |
| 1208 | CACTCCCAAAGTCGGCTTCGTCAGTCTTG | 1539 | CCCCTAGTATAGGATGGGTTTCGTTAGG |
| | GATGCCCCAAGGCGCTGGTCGACTCCGAG | | GTGCCCCAACGAATAGAAAAGTAAACTA |
| | CGCATCCTCA | | GCTTTCAGCG |
| 1209 | GGTGAGGATGCGCTCGGAGTCGACCAGCG | 1540 | CTTAAAGATTGAGTTTACTTTTGCAGTC |
| | CCTTGGGGCATCCAAGACTGACGAAGCCG | | ATTGGGGCACCCTAACGAAACCCATCCT |
| | ACTTTGGGAG | | ATACTAGGGG |
| 1210 | CACTCCCAAAGTCGGCTTCGTCAGTCTTG | 1541 | CCCCTAGTATAGGATGGGTTTCGTTAGG |
| | GATGCCCCAAGGCGCTGGTCGACTCCGAG | | GTGCCCCAACGAATAGAAAAGTAAACCA |
| | CGCATCCTCA | | GTTTTCAGCG |
| 1211 | GGTTAAGTGTATGGATATGTTCCCAAATA | 1542 | ACTCAAATGACATTCATTCTGTCCTCTC |
| | CTCCACATTGTGAGACGTGCGTACTTTTG | | AAGCCACGTTGAGTGCGTAGTATTGATG |
| | TCCCACAAAA | | TCAAGGGTTG |
| 1212 | AGCTTTCATTGCGCGACGGATGGGCTATA | 1543 | TTTTTATATAATATAGTGTTTTTGTTAA |
| | GGTACACATCAGGATACAGTAACATTGAA | | GTACACATCACTATATTTGACAAAAAGT |
| | AAAGGAACTG | | CTATAAATAA |
| 1213 | CGCATGTTCGCGGCCGGCACGCTGGTCAC | 1544 | GCCCTGTTAATATGTATATTGGCTAACG |
| | GCTCGGCAACCCGAAGATCATGCTGTTCT | | CTCGGCAACCCGAACGTTAGCCAATATA |
| | ATCTGGCATTG | | CAAACCATGCT |
| 1214 | CGCATGTTCGCGGCCGGCACGCTGGTCAC | 1545 | GCCCTGTTAATATGTATATCGGCTAACG |
| | GCTCGGCAACCCGAAGATCATGCTGTTCT | | CTCGGCAACCCGAACGTTAGCCAATATA |
| | ATCTGGCGTTG | | CAAACCATGCT |
| 1215 | GGGTGGAAATAATATAAAAGGTGGCCTTA | 1546 | AAATTTATAGTGAGGGTTTGTCATAGAC |
| | TAGGTCCTGGAGTTCACGCTTCACATGGT | | AAGACCTCCAATAAGATACAAGAACACA |
| | ATGGAGAGAAC | | ACGGCTTAAAA |
| 1216 | TTTTCCCCCGAAAATCTTTAACACCACTA | 1547 | TTATTTTGGTAGTTTATAGAAGTAATTT |
| | TCTGTTGATGTCCCAGCTCCTCCAAAAAA | | CAGTTGATATTCACTCCATTAACTACCA |
| | AACTAAATAT | | AAATAAAAAA |
| 1217 | TATCTTTTAACTGCAAGAGTACTACGGTT | 1548 | TCCACACGTGTAAGCAGTCCTACACACT |
| | TCCACGTGAGCTGTTTGCGGGAACATATC | | CGATGTGCGTTGAGAGTACACTCTGTAT |
| | GACGGGTTGCA | | CTTCCTACTAT |
| 1218 | ATCTTTTAACTGCAAAAGTACTACGGTCT | 1549 | TTACCCTAGACATCAATGCTACCAACTC |
| | CTACATGAGCTGTTTGCGGGAACATATCG | | AACATGGGACGAGTTGATAGAATTGATG |
| | ACTGGTTGCA | | TATTTGCGAT |
| 1219 | TAAGGGCATGGACATGTTTCCTCATACAC | 1550 | GAAATGACGTACTTTTCATTTCCTCGTG |
| | CTCATGTGGAAACTGTAGTTAAGCTAAGC | | CCATGTGGAGACGGTGGTATTGATGTCA |
| | AAATAATATC | | AGGGCGGAGA |
| 1220 | GCTGGTGGTGGATATCGGCGGTGGTACGA | 1551 | TCCATTAACTGTGGTGTACATCATAACA |
| | CTGACTGTTCATTGCTGCTGATGGGACCG | | TAACTGTTCGTAGTCATGCAAGAATGTA |
| | CAGTGGCGTTC | | CACCGCAGTAA |
| 1221 | ATAATCATCAAAGAGTTTAGGATTATCAA | 1552 | TACTTTAATTTTAGGTTAATGGTCCATT |
| | ATTCACTATGATACGCCCTTCCGAAAGCT | | TCCTCTAGTAAATGTTATATTAACCCAA |
| | GATACTAACGA | | AAAAAAGAGTC |
| 1222 | ACCAGCTGTAACTTTTTCGGATCAAGCTA | 1553 | CACATTATTTAGTTCCTCGTTTTCTCTC |
| | TGAGGGACGCAAAGAGGGAACTAAACACT | | GCTGGACGGAGAATAAATGAGAAACTAA |
| | TAATTGGTGTT | | AATACAAATAA |
| 1223 | AACAATCTGCAAACATGTATGGCGGTACA | 1554 | ATTAATTTTGTACGGAAGTAGATACTAT |
| | TGTATCAACATTGGTTGTATTCCTACAAA | | CTTTCAATATCCATGTTACTTAGTGCCA |
| | GACACTCATT | | TACAAAAACC |
| 1224 | AGGGCCTGGCTGCTGAACTCGGGCGTCTC | 1555 | TCGCGGCCCACTTGCTTTACACGTCTCG |
| | GTCGAGGAAGAGGACGCCCCGGTGGGACA | | TCCAGGAACGAGACGTATAAAACAAGTG |
| | GGGACACCGCG | | GCTACGGCCAG |
| 1225 | ACAATCAACAAAGATGTATGGTGGTACAT | 1556 | TAACGTATGTACGGAAGTATAGACACCT |
| | GCATTAATATCGGATGTATACCTACTAAA | | GATTAATATTTAATGTGTATACTTCCGT |
| | ACATTAATTC | | ATTTTTTATA |
| 1226 | ATGGCTGTTGCGTTGATAGCGCCAAGCGT | 1557 | GTTTTTTTGTTTGCGTTAAATGGAATTA |
| | TACTAGTACGGCATATGCAGTAGAAACAA | | TCCAGTAGGACATTTCCTAAAAGTGGCT |
| | CGAGTCAACA | | AATTTTTTGT |
| 1227 | TATCTTTTAACTGCAAGAGTACTACGGTT | 1558 | TCTTGGCGAGTGAGCAGACCTATACACT |
| | TCCACGTGAGCTGTTTGCGGGAACATATC | | CGATGTGCGTTGACTGTCTACTTAGTAT |
| | GACGGGTTGCA | | CTTCCTACTAT |
| 1228 | ATTAACAAGCACTTTAGATGGAATACAGC | 1559 | GCATAAATATATGGAAGTACACACACTA |
| | CATGGTTTATGCATGTACCGCCATAGCTT | | TACATTGGTTAATTGTGCATACTTCCAT |
| | TCTGTAAATT | | AAAATATTAA |
| 1229 | GACCACAATCCGCGTGTGGGCTTTGTATC | 1560 | GAAGCCGTATAGTATAGGAATGGTGTCG |
| | CCTTGGGTGCCCCAAGGCACTCGTCGATT | | CTTGGGTGCCCGAGTGATGCTTAAAATA |
| | CGGAGCAGATC | | CACTCGGTGCT |
| 1230 | TTCGACGAATGATGCTTTAGGGCTGAATG | 1561 | TTCATTAGCTTTGTTATCACCCTGTTGG |
| | GAGTAAACCTCATGCGCCTAATGGCTACA | | TAACAATCTAATTACACCAACAAGGTGA |
| | AAAAACATCT | | CAACAAAGCA |
| 1231 | CAAAAATTGCAGTGCGTTCAGCGATGACA | 1562 | TTTCTGCATTGTCCTATTATAATTATGA |
| | GGACATTTGATCGCTTCGACGATGCATAC | | GCCATTTGGTCATTATAATAGACCTATA |
| | GAAAGACGCT | | CACATAAACA |
| 1232 | AATTTTCTTGTCGATTGGCTATTCGACTT | 1563 | TATTCTTAGTGGGGCTTAAGTCAACTTG |
| | GTCATTGGTGTCATGTGATGGAGAGAGAA | | TCATTGGTGTCATGTTTTCTTAAGCCTC |
| | TCTTTTGAGG | | AAAATAAAAA |
| 1233 | TTTTAAAATGATTAAAGGCGGCGTTCCAA | 1564 | CTATTAATTGGGGGTATGTCTTACTTAT |
| | TAAGCGTACCCAAGCCCCCAATAGTGCCG | | TAGCGTACCTATTTCGCACCCCCAATAA |
| | GCATAACCGA | | ACACCCCACC |
| 1234 | GGGTGAGGATGCGCTCGGAATCGACAAGG | 1565 | CATCTACCGCAAAGTATAGGTATTTAAT |
| | GCCTTCGGGCAGCCAAGGCTGACGAAGCC | | CCTTCGGGCACCCCAATGAAACAAACCC |
| | GACTTTGGGG | | TATACTTCTA |
| 1235 | AGCAACCCCCCTGCTGTTGGGCTTAACGT | 1566 | TCAAAAAAGCGTGAGTTTTAGATACCAA |
| | GCTTCTCGATGAAAGTGATACTGAGCCTG | | ACATTCTAAAAGCGTATCTAAAACTCTC |
| | AGAAATTAGA | | ATTCAATAGG |
| 1236 | CCATCATAAGATGCCTTTTTACCGACGAG | 1567 | AAAGCATTATTTAGGTACTACAACTAGT |
| | TATAGTTGTACATGCCATTATCAGTCTCC | | ATAGTTGTACATGAAAAACGCTGTATTT |
| | TTTACAAACG | | TTTTATCCAT |
| 1237 | CCAGATCAGTGCGCCCCCGGCGGTCCAGA | 1568 | AAATCCTCCCTTTTACATCTGTACGGGC |
| | GCAGGAAGCGGACATGGCCCATGCGGAAG | | TTGGAAGCAGGCACGTACGGTTGTAAAA |
| | AGGCCCGCTG | | GGAAATCCTA |
| 1238 | TAACACCAATTAAGTGTTTAGTTCCCTCT | 1569 | TCTTTATTTTTTTGTATCCCATTTCCTC |
| | TTGCGTCCCTCATAGCTTGATCCGAAAAA | | TCCCTCCAACGAGAGAAAACGAGAAACT |
| | GTTACAGCTGG | | AAACAATCTAA |
| 1239 | AACAGTTCCTTTTTCAATGTTACTGTAAC | 1570 | TTATTTATAGACTTTTTGTCAAATATAG |
| | CTGATGTGTACCTATAGCCCATCCGTCGC | | TGATGTGTACTTTACAAAAACACTATTT |
| | GCAATGAAAG | | TATATAAATA |
| 1240 | GTGAATGATTTGGTTTTTAATATTTAAAA | 1571 | TTTAATTTATTCGTATTTACGTTACCTT |
| | AAAGAACAACAAAATGTTCCTGATTAAGT | | CACTACTACTAACTTCACATAAACCCAA |
| | GAAGTCATGT | | ACTTTTTACA |
| 1241 | GTGGATCACCTGGTTTTTCGTGTTCAGAT | 1572 | CTCCTTTTATTAGGGTTTGTGTCATCTA |
| | ACAGGCATACGAAGTGCTCCTGAGACAGA | | CACACATGTAAAGTTTACATAAACCCTA |
| | AAGCGCATATC | | AAAAGATCGAC |
| 1242 | ACTTTTTATATTGCAAAAAATAAATGGCG | 1573 | AGTGTGGTTGTTTTTGTTGGAAGTGTGT |
| | GACGAGGTATCAGGATACCTCATCTGCCA | | ATCAGGTAACAGCATAGTTATTCCGAAC |
| | ATTAAAATTTG | | TTCCAATTAAT |
| 1243 | TAACACCAATTAAGTGTTTAGTTCCCTCT | 1574 | ATGTTCTTTTTTTGTATCTCGTTTCTTC |
| | TTGCGTCCCTCATAGCTTGAACCGAAAAA | | TTCTTCCAACGAGAGAAAACGAGGAACT |
| | GTTACAGCTGG | | AAACAATCTAA |
| 1244 | AGATAAAACACTCTCCAGGAAACCCGGGG | 1575 | TGAGACAAACAGCCATGGCTGGTTCCCG |
| | CGGTTCAGATGGCGCACTCATCACCGGAC | | GATACATACAATTATTTGTTATTGTGCA |
| | TGACCTTTCT | | TCATTCTGGT |
| 1245 | ATATGTTCCCGCAAACAGCTCACGTTGAG | 1576 | TATCCCCTCCTCTCAAAACATGTAGAGA |
| | ACGGTAGTACTTTTGCAGTTAAAAGATAA | | CCGTAGTATTGATGTCAAGGGTAGATAA |
| | ATAAAGGACT | | GTAAGAGTGT |
| 1246 | ATATGTTCCCGCAAACAGCTCACGTTGAG | 1577 | TATCCCCTCCTCTCAAAACATGTAGAGA |
| | ACGGTAGTACTTTTGCAGTTAAAAGATAA | | CCGTAGTATTGATGTCAAGGGTAGATAA |
| | ATAAAGGACT | | GTAAGAGTGT |
| 1247 | AACCAGCTGTAACTTTTTCGGATCAAGCT | 1578 | TTAGCTTATTTAGTACCTCGTTTTCTCT |
| | ATGAGGGACGCAAAGAGGGAACTAAACAC | | CGTTGGAAGAAGAATAAACGAGATACCA |
| | TTAATTGGTGT | | AAAAAGAACAT |
| 1248 | TGTTAACCACATAAACATAAATGGTACAA | 1579 | TAAATTTTAATAGCAGTTGTGTCACTAT |
| | CTAATGTGGCACCTGTACCACCCATAGTT | | TTAGGTCTATCGTGTGACAAAACTAACA |
| | ACCACGAACA | | TACAAAAACC |
| 1249 | AAATGTTCGTTGCAACTATGGGGGGTACC | 1580 | AGTTTTATACATAAAAATAGTGTAACAA |
| | GGTGCTACATTAGTCGTTCCATTTATGTT | | GCACTACCTACCCTGTAACACTACTACC |
| | TATGTGGTTA | | ATTAAAATTT |
| 1250 | ATAATGCAACATAGTCTCCAGTACCACCT | 1581 | AAAAAAAGGCGCTCTTTGATGTAGCGCC |
| | TTATATGCACCAGCAGTTGCTGAAAAATC | | CATATGCTCACTACATGAAAAAGCGATA |
| | TATATTTGTT | | ATTTTAAGTA |
| 1251 | ACCAGCTGTAACTTTTTCGGATCAAGCTA | 1582 | TAGATTGTTTAGTTCCTCGTTTCCTCTC |
| | TGAGGGACGCAAAGAGGGAACTAAACACT | | GTTGGACGGAGAATAAATGAGATACTAA |
| | TAATTGGTGTT | | TCCATAATAAT |
| 1252 | AACCAGCTGTAACTTTTTCGGATCAAGCT | 1583 | TTAGATTGTTTAGTTCCTCGTTTTCTCT |
| | ATGAGGGACGCAAAGAGGGAACTAAACAC | | CGTTGGAAGAAGAAGAAACGAGATACCA |
| | TTAATTGGTGT | | AAAAAGAACAT |
| 1253 | ATGAATTAATGTTTTAGTAGGTATACATC | 1584 | GGTTATTTTTACGGAAGTATACACATTA |
| | CGATATTAATGCATGTACCACCATACATC | | AATATTAATCAGGTGTCTATACTTCCGT |
| | TTTGTTGATT | | ACATATGTTA |
| 1254 | AGCTGCGCGCGCAGTATTTCTCGAAGGAG | 1585 | ATGACTTCGATAGTTAATTATGAAACAC |
| | CCCATGGATCCGGACGTATCCATCATGGC | | TCTTGGATATAGGTGCATCAAAATTAAC |
| | GATAATGACC | | TAAAGGAAAA |
| 1255 | TCATCACTACTTAATATATCCATAAGAGA | 1586 | TGCGTTAGGTGTATATCATGCCTAGCGC |
| | AATTTCATTTCCTTCTTTATCTACTCCTA | | AATTCATTACATCATACATGTTGTACAC |
| | TAGGATCTTG | | CTACTTTAAA |
| 1256 | AACCAGCTGTAACTTTTTCGGTTCAAGCT | 1587 | TTAGCTTGTTTAGTACCTCGATTTCTCT |
| | ATGAGGGACGCAAAGAGGGAACTAAACAC | | CGTTGGAGGGAGAAGAAACGGGATACCA |
| | TTAATTGGTGT | | AAAATAAAGAC |
| 1257 | AACCAGCTGTAACTTTTTCGGATCAAGCT | 1588 | TCAACTGGTTTAGTGCCTCATTTCCTCT |
| | ATGAGGGACGCAAAGAGGGAACTAAACAC | | CGTTGGAAGAAGAAGAAACGAGATACCA |
| | TTAATTGGTGT | | AAAAAAGAACA |
| 1258 | ATGAAGGACTTGATTTTTAGTATTGAGAT | 1589 | AGAATTTTATTAGTATTTATGTCAGGTT |
| | AAAGACAAACGAAATTTTCCTGTTGTAAA | | TAAGCATGTAAACATAACATAAACACAA |
| | AACCTCATAT | | AAAATCTTAT |
| 1259 | TCCCCGTGTCGGCGGTTCGATTCCGTCCC | 1590 | TATGTGGGTTTGGTTTTCTGTTAAACTA |
| | TGGGCACCATGAATACGACGAAAAGGCTC | | CACCACCAAAATTCAGCGCCCAACTGTT |
| | ACCTCCGGGTG | | CTCAGTTGGGC |
| 1260 | TCCCCGTGTCGGCGGTTCGATTCCGTCCC | 1591 | TATGTGGGTTTGGTTTTCTGTTAAACTA |
| | TGGGCACCATGAATACGACGAAAAGGCTC | | CACCACCAAAATTCAGCGCCCAACTGTT |
| | ACCTCCGGGTG | | CTCAGTTGGGC |
| 1261 | AACCAGCTGTAACTTTTTCGGATCAAGCT | 1592 | TTAGATTGTTTAGTATCTCGTTATCTCT |
| | ATGAGGGACGCAAAGAGGGAACTAAACAC | | CGTTGGAGGGAGAAGAAACGGGATACCA |
| | TTAATTGGTGT | | AAAATAAAGAC |
| 1262 | GGTGAGGATGCGCTCGGAGTCGACCAGCG | 1593 | CGCTGAAAGCTAGTTTACTTTTCTATTC |
| | CCTTGGGGCATCCAAGACTGACGAAGCCG | | GTTGGGGCACCCTAACGAAACCCATCCT |
| | ACTTTGGGAG | | ATACTAGGGG |
| 1263 | GAGTTCTCTCCATACCATGCGAAGCGTGA | 1594 | ATTCTTTAAAAAGAGTTCTCGTATTTTA |
| | ACTCCAGGACCTATAAGGCCACCTTTTAT | | TTGGAGGTCTTGTCTATGACATACCCTC |
| | ATTATTTCCAC | | ACTATAAATTT |
| 1264 | GAAAGTTTTTCTGAATCCTCTTCATTCAT | 1595 | TTCTCTAATCTTCTTTATTTCTACATAC |
| | TTGGCAACCCCAGGTTTCTATGAAAAATT | | GGTCAACCGTATGTAGAAATAAAGAAGT |
| | CACCTATAACA | | ATTGAGTAGTA |
| 1265 | AGCCTCTGTGCCAAGTATATCTAAAAGAC | 1596 | TAGAAAATAACATATAAAAAGTAGTGTT |
| | TTATTTCATTACCTTCTTTATCTGTTCCG | | TATTTCATTACACACTACTCTTTATATG |
| | ATAGGGTCTT | | TTATTGGTAT |
| 1266 | AGGCAGATCACCTGTAACCCTTCGATTAT | 1597 | AGGCCAGAGCAGCGTCTGGCCTTTAAAT |
| | TCTTGGTGGAGCGGAGGAGGATCGAACTC | | AATGGTGGTGGAATGGCGACGAAATAAA |
| | CCGACCTTCG | | AACCCAAAAT |
| 1267 | GTCTTCTGGACCATGATGCGCCACTTCCG | 1598 | TGTATCTTGATGTACAACATTGCTCTTT |
| | AAATTTCAAAAAGATCAGTGGTCAAACGG | | ATTTTCAAATACAGATTAATGTTGTATA |
| | CTCATTAATTT | | AAGTAACCCTG |
| 1268 | TATGCAACCCGTCGATATGTTCCCGCAAA | 1599 | ATAGTAGGAAGATACTAAGTAGACAGTC |
| | CAGCTCACGTGGAAACCGTAGTACTCTTG | | AACGCACATCGAGTGTGTAGGACTGCTT |
| | CAGTTAAAAGA | | ACACGTGTGGA |
| 1269 | GTTAACAAGCACTTTAGACGGAATACAGC | 1600 | ACATAAATATATGGAAGTACACACACTA |
| | CATGGTTTATGCATGTACCGCCATAGCTT | | TACATTGGTTGATTGTGCATACTTCCAT |
| | TCTGTAAACT | | AAAATATTAA |
| 1270 | GAATGATGCGTTGGGGCTTAATGGAGTAA | 1601 | TATATTGTCATCACCCTGTTGGCGTCAA |
| | ATCTAATGCGCCTAATGGCTACAAAAGAC | | CCTAATTACACCAACAAGGTGACGACAA |
| | ATCTACTTCG | | AGCATAAACG |
| 1271 | GTATTATTAGGGGTGTTTGCAATCGGGGC | 1602 | TACATATTTTCATTATAATTTAAAGACG |
| | ACCAGGAGTCCCTGGGGGGACAGTAATGG | | GTAGGAGTACGAGGTGTCTTTAAATAGT |
| | CATCATTAGG | | TATGAAATTA |
| 1272 | GAAGAGCACCGAGCGCAGGAAGAGCGTGT | 1603 | GGTCAGGCGGCACCTAGGGGGGTGGTTA |
| | ACTGCTCCCACGCCGTCCACTCCGTGATG | | ACGCTCCCATGAGCGTTGCGCACACCCT |
| | CGCCGGTCCGA | | AATGTTGCCTC |
| 1273 | CAGCCGGCTGATTTATTTCCAAATACGCA | 1604 | TCCATAATATGGGTAAGACCTATCACCA |
| | TCACGTGGAGTGCGTAGTGTTGCTACAAC | | CACGTGGAGTGTGTTGCTCTGCTTGTAA |
| | GAAGCAACGGG | | AAGCTTAGAAA |
| 1274 | CAGCCGACTGATTTGTTTCCGAATACGCA | 1605 | ATATGACATCAATGCCATCAACTCGAGC |
| | TCACGTGGAGTGCGTAGTGTTGCTACAAC | | CACGTGGAGTGTGTGGTTCTGCTCGTAA |
| | GAAGCAACGGG | | AAGCCTAGAAA |
| 1275 | AACCAGCTGTAACTTTTTCGGATCAAGCT | 1606 | TTAGATTGTTTAGTTCCTCGTTTTCTCT |
| | ATGAGGGACGCAAAGAGGGAACTAAACAC | | CGTTGGAGGGAGAAGAAACGGGATACCA |
| | TTAATTGGTGT | | AAAATAAAGAC |
| 1276 | AGTTCAGCCCGTGGATTTGTTTCCAATGA | 1607 | TCGTTCCATAATATGGGTAAGACCTATC |
| | CGCATCATGTGGAGTGCATAGCGTTGATA | | ACCACACATCGAGTGTGTGGTTCTGCTC |
| | CAAAGAGTGA | | GTAAAAGCCT |
| 1277 | CGGGCAAATTGCTGCCATATGGACCGGAG | 1608 | CTATTTATTAGATGTCTAAACAGTGCAT |
| | GCGGGACTTTAATTCCTTGGGCGCTTATT | | TACTACTCTACAACCTATATTAGACATC |
| | CCTGCCGCTGC | | TTATAAAAAGT |
| 1278 | GTAACACCAATTAAGTGTTTAGTTCCCTC | 1609 | TATTTATAATTTTAGTTTCTCGATTCGT |
| | TTTGCGTCCCTCATAGCTTGATCCGAAAA | | CTCCGTCCAGCGAGAGATAACGAGGTAC |
| | AGTTACAGCTG | | TAAATAATCTA |
| 1279 | TCTAACTCACGACACGTTGTACTCTTACC | 1610 | CAGTTTTTATTTTATGCCTTAATTATAC |
| | AACCGCACTTGCTCCCTCAAACGCTATAA | | ACCGCACTTGCGGTATGTCAATATGGCA |
| | TCCCCATAGTT | | AAAAGCTATTC |
| 1280 | AGGCAGATCACCTGTAACCCTTCGATTAT | 1611 | AGGCCAGAGCAGCGTCTGGCCTTTAAAT |
| | TCTTGGTGGAGCGGAGGAGGATCGAACTC | | AATGGTGGTGGAATGGCGACGAAATAAA |
| | CCGACCTTCG | | AACCCAAAAT |
| 1281 | AGCAGGATGGAGATAACGAGCATGACGAC | 1612 | AAACAAAAATAAGGGGTTATTACCCCTA |
| | TAACATTTCTATCAGTGTAAATCCCTTTT | | TTTATTTCAATAAATATGGGTAATAACC |
| | CATTCACAGTT | | CTTAAATGATT |
| 1282 | CTTGTGGATCACCTGGTTTTTCGTGTTCA | 1613 | TGTCTCTTTTTATTAGGGTTTATATCAA |
| | GATACACACATACGAAGTGCTCCTGAGAG | | CTACACACATGTAAAGTAGACATAAACA |
| | AGAAAGCGCAT | | GCAAAAATTTG |
| 1283 | ATATCCCAAATGGAAAAGTTGTTAAACCG | 1614 | AAAAATTTAGTTGGTTATTGGTTACTGT |
| | TGTATAACGATACCAATCCCCCAACCTCC | | AACAAATCTTACGGTAACCAATAACCAA |
| | AAGTGGATAT | | CTTTAAAACT |
| 1284 | TTTAAATTTTGTCCTTTCTTCCCGCTATA | 1615 | TTTTTATTTTTATCCCCTAATTATACAT |
| | CCCGCTTGGCATTGTAAAAGATAAATAGT | | GGGATTCCTCATATGTCAATAAGGATAA |
| | TCGCCCACTC | | AAATATTATT |
| 1285 | ATGGCTGTTGCGTTGATAGCGCCAAGCGT | 1616 | GTTTTTTTGTTTGCGTTAAATGGAATTA |
| | TACTAGTACGGCATATGCAGTAGAAACAA | | TCCAGTAGGACAGTTCCTAAAAGTGGCT |
| | CGAGTCAACA | | AATTTTTTGT |
| 1286 | CCAAATATTAAATTCTGCAGTAGGCGTCC | 1617 | AAAGTTTAGATGGGGTTTGTGGGTAGAG |
| | AATTTCCAAAGGTTCCTCCACCCATAATT | | CCTCCCGAATAACACACCAAAACCCCCA |
| | GTTATAGAAT | | CATATGCCAC |
| 1287 | CATTTTTACCTTGCTCTTCTCTCGAATTT | 1618 | AGTTTTATTTTTGTCTGTATAGGCTGTC |
| | CAGCATCTGCATGGCGCATAACATATTTA | | CGCATCTGCGGTATGCTTATAGGGACAA |
| | TGCGCTACAG | | AAATTATAAA |
| 1288 | TTTGCGAGACTACGGATCTGGATCTCGTC | 1619 | GCTAACAGATCGGCATATGAGTGCTATC |
| | CCACTGCTGGCGCGGTCCCGCGATATCGC | | TACTGCTGGCAGTGAACTGTACTCAGAC |
| | GCCGCAGGTAC | | GCAAATAAGCA |
| 1289 | AGAAAAGCACGCTGATAATCAGCAAGACC | 1620 | AATTGGAAAATATAAATAATTTTAGTAA |
| | ACCAACATTTCCACAAGTGTAAAAGCTTT | | CCTACATTTCAATCAAGGATAGTAAAAC |
| | AACCTTCGCT | | TCTCACTCTT |
| 1290 | ACACCAGAAATCAAGGAGTCTTACCAGTA | 1621 | TTTTATCAAAAATTTTACTATCCTTGAT |
| | TGGAAATGAAAATACAAGCTTCTTTACCA | | TGAGATGTAGGTTACTAAAATTATTTAT |
| | GTATGATTCCG | | ATTTTCCACTT |
| 1291 | ATGTACGAGTACTTTAGAGGGTATACAGC | 1622 | TTATTTTATTATGGAAGTTTGTACACTT |
| | CGTGGTTTATGCATGTGCCGCCAAAGTTG | | AACATTGCAAGACTGTACATACTTCCAT |
| | TCTGAGGATT | | AGTTTATTAA |
| 1292 | AACAATCTGCAAACATGTATGGCGGTACA | 1623 | ATTAATTTTGTACGGAAGTAGATACTAT |
| | TGTATCAACATTGGTTGTATTCCTACAAA | | CTTTCAATATAGAACGTTTATAGTTCCA |
| | GACACTCATT | | TACAAAAATA |
| 1293 | TGTAACACTTCATTTTTGACGTTCAGAAA | 1624 | TAAAATAGTATGTATTTATGTAAGTTTA |
| | CAGCACGACGAAATGTTCCTGGTTCAATG | | ACCACGACCAACCTTACATAAATGGTAA |
| | ACGACATATCT | | CTATTATATAT |
| 1294 | GCTTCTGGACGCGGGTTCGATTCCCGCCG | 1625 | CCCGACAGTTGATGACAGGGTGCGACCC |
| | CCTCCACCACCCAACACCCCGGAAAGCCC | | CACCACCAATATCCGAACCCTAACCGCT |
| | TTGTTTTACA | | CTCGGTTGGG |
| 1295 | GCTTCTGGACGCGGGTTCGATTCCCGCCG | 1626 | CCCGACAGTTGATGACAGGGTGCGACCC |
| | CCTCCACCACCCAACACCCCGGAAAGCCC | | CACCACCAATATCCGAACCCTAACCGCT |
| | TTGTTTTACA | | CTCGGTTGGG |
| 1296 | GTAACACCAATTAAGTGTTTAGTTCCCTC | 1627 | TATTTATAATTTTAGTTTCTCGATTCGT |
| | TTTGCGTCCCTCATAGCTTGATCCGAAAA | | CTCCGTCCAGAGAGAGAAATTGAGGTAC |
| | AGTTACAGCTG | | TAAACAACGTA |
| 1297 | ACCGTAAAATAACATTTCTGTTTTTCCAG | 1628 | GTAATTATTTTATGTATTCATTTCCGGC |
| | CCCCGCACACAGCCCAAATAAAAAAAGAT | | TATTCAAGTAGCTAGTCTTGAATACCGA |
| | TTTTTCTGCT | | AAAAAAATTC |
| 1298 | GAATGATGCGTTGGGGCTTAATGGAGTAA | 1629 | TATATTGTCATCACCCTGTTGGCGTCAA |
| | ATCTAATGCGCCTAATGGCTACAAAAGAC | | CCTAATTACACCAACAAGGTGACGACAA |
| | ATCTACTTTG | | AGCGCGAACG |
| 1299 | GAAACTATGGGGATTATAGCGTTTGAGGG | 1630 | GAATAACTTTTTGCCGTATTGACATACC |
| | AGCAAGTGCGGTTGGTAAGAGTAGCACGT | | GCAAGTGCGGTGTATAATTAAGGCATAA |
| | GTCGTGAATTA | | AATAAAAAACG |
| 1300 | TTCGGACGCGGGTTCAACTCCCGCCAGCT | 1631 | GAATGAATAGCTAATTACAGGGACGCCA |
| | CCACCAAATATTGATGTACTGAAGTTCAG | | GCCCAAATAAAACAAGGGGTTACGTGAA |
| | TAAAGTCTACT | | AACGTAGCCCC |
| 1301 | AATTTTTAAAAAAAGTCGACAAGCATTTA | 1632 | TAATAGAAAGAAAAATATATTTATTATA |
| | CTCTAATTGAAGCAGCAATTGTGCTTTTC | | TCTAATTGAAACGGCTTATAGTCATTAT |
| | ATTATTAGTT | | GTTTATTTTG |
| 1302 | AGAGAAGTTGCCGGAAGCATGGTTCTAGT | 1633 | TAGATAGAGTTTATGGATTATAAGAGGT |
| | TTCTTTGGAAGAAAAGAAGGAACGAAGGA | | TTATTGGGCAAAACCTCTTGAAATACAT |
| | GTTAACGCGT | | AAAAAGAGTT |
| 1303 | CACCTGGCGTGGCGAAGTGCGCAGTCTGG | 1634 | AAGAGATTCACCAAGACTTTTAGATTGA |
| | AAGCACTAAATAGCTGCGCGGAATAGTAG | | CCACCTAGTACGTTGGCAGTCACCTGAA |
| | ATCACTTTGAG | | CGTGGGTTGAT |
| 1304 | ATAACGCATACATTGTTGTTGTTTTTCCA | 1635 | ATCAATAACGGTTGTATTTGTAGAACTT |
| | GATCCAGTTGGTCCTGTAAATATAAGCAA | | GACCAGTTTTTTTAGTAACATAAATACA |
| | TCCATGTGAG | | ACTCCGAATA |
| 1305 | TATGTTCAGGTTTGATCATTTTCCAAAAA | 1636 | ACTCAAATGACATCAATTCTGTCCTCTC |
| | CGTATCAAAGCGTGTGTGTTCAACGTTTT | | AAGACATGTGGAGTGTGTTGTCTTGATG |
| | TTTCTTTTCC | | TCAAGGGTGG |
| 1306 | TATGTTCAGGTTTGATCATTTTCCAAAAA | 1637 | ACTCAAATGACATCAATTCTGTCCTCTC |
| | CGTATCAAAGCGTGTGTGTTCAACGTTTT | | AAGACATGTGGAGTGTGTTGTCTTGATG |
| | TTTCTTTTCC | | TCAAGGGTGG |
| 1307 | TATGCAACCCGTCGATATGTTCCCGCAAA | 1638 | ATAGTAGGAAGATACTAAGTAGACAGTC |
| | CAGCTCACGTGGAAACCGTAGTACTCTTG | | AACGCACATCGAGTGTGTAGGACTGCTT |
| | CAGTTAAAAGA | | ACACGTGTGGA |
| 1308 | TAACACCAATTAAGTGTTTAGTTCCCTCT | 1639 | GTCTTTATTTTTGGTATCCCGTTTCTTC |
| | TTGCGTCCCTCATAGCTTGAACCGAAAAA | | TCCCTCCAACGAGAGAAATCGAGGTACT |
| | GTTACAGCTGG | | AAACAAGCTAA |
| 1309 | GTAACACCAATTAAGTGTTTAGTTCCCTC | 1640 | ATTATTATGGATTAGTATCTCATTTATT |
| | TTTGCGTCCCTCATAGCTTGATCCGAAAA | | CTCCGTCCAGCGAGAGATAACGAGGTAC |
| | AGTTACAGCTG | | TAAATAATCTA |
| 1310 | GCTGGTGGTGGATATCGGCGGTGGTACGA | 1641 | TCCATTAACTGTGGTGTACATCATAACA |
| | CTGACTGTTCATTGCTGCTGATGGGGCCG | | TAACTGTTCGTAGTCATGCAATAATGTA |
| | CAGTGGCGTTC | | CACCGCAGTAA |
| 1311 | TATGCAACCAGTCGATATGTTCCCGCAAA | 1642 | ATAGTAGGAAGATACAGAGTGTACTCTC |
| | CAGCTCATGTAGAGACCGTAGTACTTTTG | | AACGCACATCGAGTGTGTAGGACTGCTT |
| | CAGTTAAAAG | | ACACGTGTGG |
| 1312 | AACCAGCTGTAACTTTTTCGGATCAAGCT | 1643 | TTAGCTTGTTTAGTACCTCGATTTCTCT |
| | ATGAGGGACGCAAAGAGGGAACTAAACAT | | CGTTGGAGGGAGAAGAAACGGGATACCA |
| | TTAATTGGTGT | | AAAATAAAGAC |
| 1313 | AACCAGCTGTAACTTTTTCGGATCAAGTT | 1644 | TTAGATTATTTAGTACCTCGTTATCTCT |
| | ATGATGGACGTAAAGAGGGAACAAAGCAC | | CGCTGGAAGAAGAAGAAACGAGAAACTA |
| | CTAATAGGTGT | | AAATTATAAAT |
| 1314 | TAACACCAATTAAGTGTTTAGTTCCCTCT | 1645 | GTCTTTATTTTTGGTATCCCGTTTCTTC |
| | TTGCGTCCCTCATAGCTTGAACCGAAAAA | | TCCCTCCAACGAGAGATAACGAGATACT |
| | GTTACAGCTGG | | AAACAATCTAA |
| 1315 | ATAATCATCAAAGATTTTAGGATTATCAA | 1646 | TACTTTAATTTTGGGTTAATGGTCCATT |
| | ATTCACTATGATACGCCCTTCCGAAAGCT | | TCCTCTAGTAAATGTATTATTAACCCAA |
| | GATACTAACGA | | AAAAAGAGTCT |
| 1316 | CATCTTTACTTTGCTCTTTTCTCGAATTT | 1647 | AGTTTTATTTTTGTCTATATAGGCTGTC |
| | CAGCATCTGCGTGTCTCATAACGTATTTA | | GGCATCTGCGGTATGCTTATAGGGACAA |
| | TGCGCTACAG | | AAATTATAAA |
| 1317 | CTGTTTCAACAAATGATGCTCTTGGCCTT | 1648 | AAAAATAAATATCTTTGTCGCCATCGTG |
| | AATGGTGTAAACCTTATGCGTTTAATGGC | | TTGGTGTAAACCTAATTACACCAACAAG |
| | GACAAAACATA | | GTGACAACAAA |
| 1318 | AGCTAAGTGTCCTAATTGGCCCCCGATCC | 1649 | TACATAATTTCGTATATTAGGTATAACC |
| | CGGTTTCAATAGTTTGGGGAATCTTTGTA | | AGTTTCAATTGGAAATACCTAATATACG |
| | AGTGGTAAGC | | AAAAAGGTGT |
| 1319 | CGGCCTTCCACTTACAAAAATTCCGCAGA | 1650 | CGCCTTTTTTCGTATATTAGGTATTTCC |
| | CAATTGAAACCGGGATCGGGGGCCAATTA | | AATTGAAACTGGTTATACCTAATATACG |
| | GGACACTTAG | | AAAATATGCA |
| 1320 | GTAGATGTTTTTTGTTGCCATTAGGCGCA | 1651 | CGCTTTGTTGTCACCTTGTTGGTGTAAT |
| | TGAGGTTTACTCCATTAAGCCCTAAAGCA | | TAGATTGTTACCAACAGGGTGATAACAA |
| | TCATTCGTCG | | AGCTAATGAA |
| 1321 | AATATGTTTTGTCGCCATTAAACGCATAA | 1652 | TTTGTCGTCACCTTGTTGGTGTAATTAG |
| | GGTTTACACCATTAAGGCCAAGAGCATCA | | GTTTACACCAACATGATGACAACGAAGA |
| | TTTGTTGAAAC | | TATTTACTTTT |
| 1322 | AATATGTTTTGTCGCCATTAAACGCATAA | 1653 | TTTGTCGTCATCTTGTTGGTGTAATTAG |
| | GGTTTACACCATTAAGGCCAAGAGCATCA | | GTTTACACCAACTTGATGACGACAAAAA |
| | TTTGTTGAAAC | | TATTTATTTTT |
| 1323 | CGTCGTTAGTATCAGCTTTCGGAAGGGCG | 1654 | AGACTCTTTTTTTGGGTTAATAAAACAT |
| | TATCATAGTGAATTTGATAATCCTAAAAT | | TTACTAGAGGAAATGGACCATTAACCTA |
| | CTTTGATGATT | | AAATTAAAGTA |
| 1324 | GCGCGTGATATTGCGACGTATTTTAATCA | 1655 | ACAATACATTTTACTTCAATGTATAGGT |
| | TACATTCGGCACGACATTTACACTTCCGA | | ACATTCGGCACAGCGAGTTTATCTATAA |
| | AGTATGTCAT | | GTTGAAGTAA |
| 1325 | GTTTTTTGTTGCCATTAGGCGCATGAGGT | 1656 | GTCGTCACCTTGTTGGTGTAATTAGGTT |
| | TGACGCCATTAAGCCCTAGAGCATCATTC | | GACTCCAACAGGGTGATGACAATATAAA |
| | GTCGAAACAGC | | CATTTCTTTTT |
| 1326 | ATTGATTCTACAACAGAAGTTGGCATACT | 1657 | CGCTCCTTTAATTTTGCTTAAAGGAGCA |
| | AGAAACTAGTACTTTAAGAGCACCAAAAA | | AAGACTAGTATCTTATTTATCTTAAGCT |
| | TAAATAATGTA | | AAAATTAAAAT |
| 1327 | CATCTTTACTTTGCTCTTCTCTCGAATTT | 1658 | AGTTTAATTTTTGTCTATATTGGCTGTC |
| | CAGCATCTGCATGGCGCATCACATATTTA | | TGCATCTGCGGTATACTTATAGGGACAA |
| | TGCGCTACAG | | AAATTATAAA |
| 1328 | AAAATTAACAAGCTAATAATGAACAAGAC | 1659 | TTTTATACCTTTTTGAATATATTTAGAG |
| | AATCGTCATTTCCACCAGGGTAAAGCCCT | | ATCGTCATTTCAATAGCACTCCCCAAAT |
| | TGGCCACCCGT | | CTTTTTAATAG |
| 1329 | TTTGTTGACTCGTTGTTTCTACTGCATAT | 1660 | ACAAAAAATTAGCCACTTTTAGGAACTG |
| | GCCGTACTAGTAACGCTTGGCGCTATCAA | | TCCTACTGGATAATTCCATTTAACGCAA |
| | CGCAACAGCC | | ACAAAAAAAC |
| 1330 | TAACACCAATTAAGTGTTTAGTTCCCTCT | 1661 | TGTTCTTTTTTTGGTATCTCGTTTCTTC |
| | TTGCGTCCCTCATAGCTTGATCCGAAAAA | | TTCTTCCAACGAGAGAAAACGAGGTACT |
| | GTTACAGCTGG | | AAATAAACTAA |
| 1331 | GTCTTCTGGACCATGATGCGCCACTTCCG | 1662 | TGTATCTTGATGTACAACATTGCTCTTT |
| | AAATTTCAAAAAGATCAGTGGTCAAACGG | | ATTTTCAAATACAGAATAATGTTGCATA |
| | CTCATTAATTT | | AAATAGCCCTG |
| 1332 | TAACACCAATTAAGTGTTTAGTTCCCTCT | 1663 | ATGTTCTTTTTTGGTATCTCGTTTCTTC |
| | TTGCGTCCCTCATAGCTTGATCCGAAAAA | | TTCTTCCAGCGAGAGATAACGAGGTACT |
| | GTTACAGCTGG | | AAATAATCTAA |
| 1333 | CGCGACACCAGCCTCGTCGTGGTCCCGCA | 1664 | GGTTTTCTTTGCCCCTTTGCGCGCACAG |
| | GTTCCACGTCAACGCCTGGGGCCTGCCGC | | TCCCACGTATGTGCGCGCAAAGGGGGAA |
| | ACGCGGTGTT | | GGAGGCGGCC |
| 1334 | GTGTCGGCAGCCCTGCAGGTCGGATATCG | 1665 | CTGCATCTACCATGTTCTACAATCTACC |
| | CAGCATCGACACCGCCAAGATCTACGACA | | AGCATCGACACTTCATTGGTAGGACTTG |
| | ACGAGGCGGG | | GTAGAACGGT |
| 1335 | TCCGCAGCAATATCTTCATACAAATCGGC | 1666 | GCGCATTTAGTTTGTGTTTTTAAAAGCA |
| | AATAGGATCTCCTTTTGCCTGGATATAAG | | ATAGGATCTCCTTTTGCTTTTAAAGACA |
| | TGGCAGTGAAT | | TAACAAATAGT |
| 1336 | TATCTTTTAACTGCAAGAGTACTACGGTT | 1667 | TCTTGGCGAGTGAGCAGACCTATACACT |
| | TCCACGTGAGCTGTTTGCGGGAACATATC | | CGATGTGCGTTGACTGTCTACTTAGTAT |
| | GACGGGTTGCA | | CTTCCTACTAT |
| 1337 | ACCAGCTGTAACTTTTTCGGATCAAGCTA | 1668 | TACGTTGTTTAGTACCTCAATTTCTCTC |
| | TGAGGGACGCAAAGAGGGAACTAAACACT | | TCTGGACGGAGACGAATCGAGAAACTAA |
| | TAATTGGTGTT | | AATTATAAATA |
| 1338 | CATTTTTACCTTGCTCTTCTCTCGAATTT | 1669 | AGTTTTATTTTTGTCTGTATAGGCTGTC |
| | CAGCATCTGCATGGCGCATAACATATTTA | | CGCATCTGCGGTATGCTTATAGGGACAA |
| | TGCGCTACAG | | AAATTATAAA |
| 1339 | ACCAGCTGTAACTTTTTCGGATCAAGCTA | 1670 | TAGATTATTTAGTACCTCGTTATCTCTC |
| | TGAGGGACGCAAAGAGGGAACTAAACACT | | GCTGGACGGAGACGAATCGAGAAACTAA |
| | TAATTGGTGTT | | AATTATAAATA |
| 1340 | TATGCAACCCGTCGATATGTTCCCGCAAA | 1671 | ATAGTAGGAAGATACTAAGTAGACAGTC |
| | CAGCTCACGTGGAAACTGTAGTACTCTTG | | AATGCACATCGAGTGTGTAGGTCTGCTT |
| | CAGTTAAAAGA | | ACTCGTGTAGA |
| 1341 | TCGTTTCAATATGTCCGTACATGGAATAA | 1672 | ATCATCCTTATACGTGTTTAGCTATGTA |
| | TAAAGCACCAGAACTTTAGCCATTTCTAA | | AAAGCACCAGTATTCTTGCCTTAACACT |
| | CCACTCCTCG | | CATGGTATTC |
| 1342 | CGAACATCTATAAATTCTGTATTGGTAGA | 1673 | GGTTTTTTTGTGTGTGGTTTTGTATGTT |
| | AACATCACAGGTGCTTTCCCTCCTGGTGA | | AAATCACAATCAAAATGCTAATACCACA |
| | ACAGTACAAC | | CACTACAATA |
| 1343 | ATAGTATTAGCTGGCGGATGTGCAACTGG | 1674 | ATTACAATATTACTTTATTTAGTCTATC |
| | CACATGGTATCGAGCTGGGGAAGGATTAA | | TTTAGGTGGAACTGGACTGAATTAAGTC |
| | TTGGTAGTTGG | | AAAATATAAAC |
| 1344 | CGACAAGGACACCACGCTCGTCGTGGTCC | 1675 | CACCTTTTTTATTTGCCCCTTTAGGCGC |
| | CTCAATTCCACGTGAACGCCTGGGGCCTG | | ACTGTTTCACGTCTGTGAGCCTAAAGGG |
| | CCGCACGCCA | | GCATCCCCAC |
| 1345 | GACGACGTCAAATGAGAAATCTGTTACAC | 1676 | TTTTTACAAAGAGGTATTTAGATACATG |
| | GTGTAACATTAGCAGTTAACCGCCGTTTT | | AGCTACAATGCCTGTATCTAAATACCTC |
| | AAATCGCAAAA | | TAAAGAAAGAC |
| 1346 | CTGTGCCGCCCGAGTGATCTGCGTGCACA | 1677 | AAAGTTTTTTTAGACGTACTAACCAATA |
| | ATCATCCCAGCGGCAGTCCCCAACCTTCG | | TCATCCCAGCGGAAAGTATCAGTTAGGC |
| | CAGGCGGATAT | | ACATAAATTAG |
| 1347 | ATGGCTGTTGCGTTGATAGCGCCAAGCGT | 1678 | GGTTTTTTGTTTGCGTTAAATGGAATTA |
| | TACTAGTACGGCATATGCAGTAGAAACAA | | TCCAGTAGGACAGTTCCTAAAAGTGGCT |
| | CGAGTCAACA | | AATTTTTTGT |
| 1348 | GAATGATGCGTTGGGGCTTAATGGAGTAA | 1679 | TATATTGTCATCACCCTGTTGGCGTCAA |
| | ATCTAATGCGCCTAATGGCTACAAAAGAC | | CCTAATTACACCAACAAGGTGACGACAA |
| | ATCTACTTTG | | AGCACGAACG |
| 1349 | GTCTTCTGGACCATGATGCGCCACTTCCG | 1680 | TGTATCTTGATGTACAACATTGCTCTTT |
| | AAATTTCAAAAAGATCAGTGGTCAAACGG | | ATTTTCAAATACAGATTAATGTTGTATA |
| | CTCATTAATTT | | AAGTAACCCTG |
| 1350 | ATAGAAATAGACCTTTCCACTGGCCAAGG | 1681 | AATTATTACTTGTGTTTTTGTAGTGGTT |
| | AGCTGATAAAACCATGCAACAAGTTTTAA | | GCTGATAAAACTATTACAAATACACAAG |
| | GTAAAAGTGCA | | TATAGAAATAG |
| 1351 | TTGATATGATATTTTATAACGGTTAATAT | 1682 | GGGAAAGTTTTGGGGAAGATTTTACATC |
| | ATTTATAAAACAACGGGCGTGTTATACGC | | ATCATAATAAATATCCTCCGGCATAGCC |
| | CCGTTTCAAT | | GGAGGTTTTT |
| 1352 | AACGTTTGTAAAGGAGACTGATAATGGCA | 1683 | ATGGATAAAAAAATACAGCGTTTTTCAT |
| | TGTACAACTATACTCGTCGGTAAAAAGGC | | GTACAACTATACTAGTTGTAGTGCCTAA |
| | ATCTTATGAT | | ATAATGCTTT |
| 1353 | GATAGTGATCGAATATATTCATGGTATGC | 1684 | TAAAATGTTCCCATTGATTGTGGTGTGT |
| | CGTCCTTTCGTTTTTTAGCACAGGTTAAG | | GTCCTTTCGTATACTATGGGAACATTTT |
| | AGCCGTTCAT | | GATTTAATAC |
| 1354 | CCCGAAGGATGCTCCCCGCTCCACCACCG | 1685 | TGGGGTCTTGCATCCAGCGTGAATGGTT |
| | TTTATGACCCGACCTGTGGATCTGGTTCG | | GTGCGAAACTTTCATGCCACGCTGGATA |
| | CTGTTGATCA | | CAAACGCGCG |
| 1355 | AATGTTTATCGTTACTTTTGGAGGTACGG | 1686 | TTTTTTTACGTGAATGTTTTGTAACTAC |
| | GTGCAACATTGGTCGTCCCGTTCATGTTT | | TACGACCTACCTCGTAACACACCATTCA |
| | ATGTGGATGA | | TCAAAATCTA |
| 1356 | TAACTCACGACACGTTGTGCTCTTACCAA | 1687 | GTTTTTATTTTATGCCTTAATTATACAC |
| | CCGCACTTGCTCCCTCAAACGCTATAATC | | CGCACTTGCAGTATGTCAATATGGCAAA |
| | CCCATAGTTT | | AAGCTATTCT |
| 1357 | ACAATCATCAGATAACTATGGCGGCACGT | 1688 | TTAATTTAGTATGGAAGTATGCACAATT |
| | GCATTAACCACGGTTGTATCCCGTCTAAA | | AACCAATGTTTAGTGTGTATACTTCCAT |
| | GTACTCGTAC | | AAAAATTAAC |
| 1358 | TATGCAACCAGTCGATATGTTCCCGCAAA | 1689 | ATAGTAGGAAGATACTAAGTAGACAGTC |
| | CAGCTCATGTAGAGACCGTAGTACTTTTG | | AACGCACATCGAGTGTGTAGGACTGCTT |
| | CAGTTAAAAG | | ACACGTGTGG |
| 1359 | GCAACCGGCATCAATGTAATACCGATAAT | 1690 | CAAATAATGTAGTACCCAAATTATGTTT |
| | CGTAACAACAGAGCCTGTCACGACCGGCG | | CACACAAGCAACCTTAATCGGGTACTAC |
| | GAAAAAACGA | | TTAATATCTA |
| 1360 | AAGAACACTAATAATCAGCAAAACAACTA | 1691 | TGGAAAATTTGATAAATTTGGTTACGTT |
| | GCATTTCAATCAGCGTAAAAGCTTTTACT | | CATTTCAATCAAGGATAGTGAAATTATT |
| | TTGAGTGTACG | | GCTTTTTCGAA |
| 1361 | GAGAGAGTAGAGTGTTGTTGTCTTGCCAG | 1692 | CTTGTTTTATTAATATTTACGTAACGTT |
| | ACCCAGTTGGACCGGTCAGAATTATTAAT | | ATCAGTTGGTAGCGTTACGTAAATATAA |
| | CCGTGTGCATG | | CTAATTATTTA |
| 1362 | CTTGTAAAACAAGGGCTTTCCGGGGTATT | 1693 | CCCAACCGAGAGCGGTTAGGGTTCGGAT |
| | GGGTGGTGGAGGCGGCGGGAATCGAACCC | | ATTGGTGGTGGGGTCGCACCCTTGTATG |
| | GCGTCCAGAA | | AAACTGACCT |
| 1363 | CTTGTAAAACAAGGGCTTTCCGGGGTATT | 1694 | CCCAACCGAGAGCGGTTAGGGTTCGGAT |
| | GGGTGGTGGAGGCGGCGGGAATCGAACCC | | ATTGGTGGTGGGGTCGCACCCTTGTATG |
| | GCGTCCAGAA | | AAACTGACCT |
| 1364 | CACTCCCAAAGTCGGCTTCGTCAGTCTTG | 1695 | CTCCCAGTGTAGGATTTATATCGCTAGG |
| | GATGCCCCAAGGCGCTGGTCGACTCCGAG | | GTGCCCCAACGAATAGAAAAGTAAACCA |
| | CGCATCCTCA | | GTTTTCAGCG |
| 1365 | CACTCCCAAAGTCGGCTTCGTCAGTCTTG | 1696 | CCCCTAGTATAGGATGGGTTTCGTTAGG |
| | GATGCCCCAAGGCGCTGGTCGACTCCGAG | | GTGCCCCAACGAATAGAAAAGTAAACCA |
| | CGCATCCTCA | | GCTTTCAGCG |
| 1366 | ATGATCTGCTCCGAATCGACGAGTGCCTT | 1697 | AGCGATGAGTATACTTTTGCTATCCTAC |
| | GGGGCACCCAAGGGATACAAAGCCCACAC | | GGGCACCCAAGCGACACCATTCCTATAC |
| | GCGGATTGTGG | | TATACGGCTTC |
| 1367 | GTCTTCTGGACCATGATGCGCCACTTCCG | 1698 | TGTATCTTGATGTACAACATTGCTCTTT |
| | AAATTTCAAAAAGATCAGTGGTCAAACGG | | ATTTTCAAATACAGAATAATGTTGCATA |
| | CTCATTAATTT | | TAATATTACTA |
| 1368 | AAAGCTAAGGTTAAAGCTTTTACATTGAT | 1699 | AAGAGTGAGAGTTTTACTATCCTTGATT |
| | TGAAATGTTGGTGGTCTTGCTGATTATCA | | GAAATGTAGGTTACTAAAATTATTTATA |
| | GCGTGCTTTT | | TTTTCCAATT |
| 1369 | TAGATACACCTGCAATTTGTTGTAATGGC | 1700 | CTTCTAATTTTTGTTTGTATAAGCATAA |
| | ACTTATTTGTATGATTATCAGGCAAAAAA | | CACATTTGAGTGTGTGACGCTTATTACA |
| | GGTTTTAGAAT | | ACATTTTCACC |
| 1370 | TCGTACGCCGGGGAGACGACGTTCGCCGC | 1701 | AGCTCGGGTTCTTCGTGTTTTGCCACGT |
| | GATGTTGACCGAGAGCGTGGCGACGAGGA | | ATGTTGACCGACAGACACGGCAAAACAC |
| | CGGTCACCAGG | | GCAGCGCCTAT |
| 1371 | GGATTTCGTTGCACTGATGGGCGGTACTG | 1702 | TCTTTTTTTATGTATGGTTTGTAACAAT |
| | GCGCGACTTTACTCGTTCCTTATTTATTT | | ATCCACCTACAATGTGCTAAACCATACA |
| | ATATTTCTTT | | TGTTAAAAAT |
| 1372 | AGTACAACCAGTCGATTTATTCCCACAAA | 1703 | ATAGTAGGAAGATACAGAGTGTACTCTC |
| | CACATCATGTGGAATTAGTGGCGCTATTA | | AACGCACATCGAGTGTGTAGGACTGCTT |
| | GCACCTAAGG | | ACACGTGTGG |
| 1373 | AGTACAACCAGTCGATTTATTCCCACAAA | 1704 | ATAGTAGGAAGATACAGAGTGTACTCTC |
| | CACATCATGTGGAATTAGTGGCGCTATTA | | AACGCACATCGAGTGTGTAGGACTGCTT |
| | GCACCTAAGG | | ACACGTGTGG |
| 1374 | ACATAAAAATATAGATTTTCCAGGGCATA | 1705 | CGAAATATCGCAATTACATAAAGCATGT |
| | ATCATGCATGGCTATATGATGTGAATAAA | | ACATGCATGGTTTATAGTATTGCAACCA |
| | ATAGAACCCGA | | TTCTACCAAAT |
| 1375 | GTCTTCTGGACCATGATGCGCCACTTCCG | 1706 | TGTATCTTGATGTACAACATTGCTCTTT |
| | AAATTTCAAAAAGATCAGTGGTCAAACGG | | ATTTTCAAATACAGAATAATGTTGCATA |
| | CTCATTAATTT | | TAATATTACTA |
| 1376 | GGTTAAGTGTATGGATATGTTCCCAAATA | 1707 | TGTTGAATAGGTTGGTCATTGGAGAACC |
| | CGCCACATTGTGAGACTGTAGTTAAACTT | | GAGCCACGTTGAGAGCGTAGTATTGTTG |
| | ATTAGAGAAT | | ACTAAAGCAC |
| 1377 | GGTTAAGTGTATGGATATGTTCCCAAATA | 1708 | TGTTGAATAGGTTGGTCATTGGAGAACC |
| | CGCCACATTGTGAGACTGTAGTTAAACTT | | GAGCCACGTTGAGAGCGTAGTATTGTTG |
| | ATTAGAGAAT | | ACTAAAGCAC |
| 1378 | AAAGCGAATGGCAAGCTCAGGCCACTCGG | 1709 | TTGAGCACTTGTGCAGTTCGCGTTGACC |
| | CATTCCGAGCCTGCGGGATCGGATCGTGC | | GTCCCGACGGTGACTTCATAATGCACCT |
| | AGCGGGCTAT | | CTCACAGTTG |
| 1379 | TAAGAAGAAAGACTCTTTTTTTATTTGGG | 1710 | TGAATTTTTTTCGGTATTCAAGACCAGC |
| | CTGTGTGCGGGGCTGGAAAAACTGAAATG | | TACTTGAATAGCCCGAAATGAATACATA |
| | CTATTTTACG | | AAAAGATAAC |
| 1380 | GACTGCGCCTCTAAAGATTTCCCTTGGAT | 1711 | CGTTTATAGTGTTTTAGGTGGTTGGCAC |
| | GAGCTACCGATTGACTTAATCCCCCAACA | | CCCTACCGACATAGCTATATCAACCCTC |
| | AAAGTCGTTTC | | AATAAATTTAT |
| 1381 | TCACACAATTGACCAACTATTAGTAACTC | 1712 | CTAATAATTGTATCAAATATGGAACGCA |
| | ACGCAGATACTGATCATATGGGGGATATC | | TACCGAAGTGTGAGTTCTGAAATTGATA |
| | GAAGTGGTTG | | CAATACAACT |
| 1382 | TCACACAATTGACCAACTATTAGTAACTC | 1713 | CTAATAATTGTATCAAATATGGAACGCA |
| | ACGCAGATACTGATCATATGGGGGATATC | | TACCGAAGTGTGAGTTCTGAAATTGATA |
| | GAAGTGGTTG | | CAATACAACT |
| 1383 | CCATCATAAGATGCCTTTTTACCGACGAG | 1714 | AAAGCATTATTTAGGCACTACAACTAGT |
| | TATAGTTGTACATGCCATTATCGGTCTCC | | ATAGTTGTACATGAAAAACGCTGTATTT |
| | TTTACAAACG | | TTTTATCCAT |
| 1384 | CCATCATAAGATGCCTTTTTACCGACGAG | 1715 | AAAGCATTATTTAGGCACTACAACTAGT |
| | TATAGTTGTACATGCCATTATCAGTCTCC | | ATAGTTGTACATGAAAAACGCTGTATTT |
| | TTTACAAACG | | TTTTATCCAT |
| 1385 | CCATCATAAGATGCCTTTTTACCGACGAG | 1716 | AAAGCATTATTTAGGCACTACAACTAGT |
| | TATAGTTGTACATGCCATTATCAGTCTCC | | ATAGTTGTACATGAAAAACGCTGTATTT |
| | TTTACAAACG | | TTTTATCCAT |
| 1386 | ACGTTTGTAAAGGAGACTGATAATGGCAT | 1717 | TGGATAAAAAAATACAGCGTTTTTCATG |
| | GTACAACTATACTCGTCGGTAAAAAGGCA | | TACAACTATACTCGTTGTAGTGCCTAAA |
| | TCTTATGATGG | | TAATGCTTTTA |
| 1387 | ACCTCCGCGCGGTCGCGCCGCGTGCGGTC | 1718 | AACGATGCTCGCGAGTCCTTTAGAGACA |
| | GTTCACCCAGGGGTCCGGCAGGAACAGCC | | CTGACCCACGTCAGTGGATCTAAAGGAC |
| | GCCAGTTGACG | | CACATCGGAGC |
| 1388 | ACAATCAACAAAGATGTATGGTGGTACAT | 1719 | TAACTTATGTACGGAAGTATAGACACTC |
| | GCATTAATATCGGATGTATACCTACTAAA | | GATTAATATTTAATGTGTATACTTCCGT |
| | ACATTAATTC | | AAAAATAACC |

Alternative Recognition Sites

| | | | |
|---|---|---|---|
| 1832 | AAAATATTTAGTTTTCTTTGGAGGAGCTG | 1888 | TTTTTAAATTTTGGTAATTAATGGAGTG |
| | GGACATCAACGGATAGCGGTGTTAAAGAT | | AACATCAACTGAAATTACTTCTATAAAC |
| | TTTCGGGGAA (rev comp*) | | TACCAAAATA (rev comp) |
| 1833 | AACAGTTCCTTTTTCAATGTTACTGTATC | 1889 | TTATTTATAGACTTTTTGTCAAATATAG |
| | CTGATGTGTACCTATAGCCCATCCGTCGC | | TGATGTGTACTTTACAAAAACACTATTT |
| | GCAATGAAAG | | TATATAAATA |
| 1834 | AACCAGCTGTAACTTTTTCGGTTCAAGCT | 1890 | TTAGCTTATTTAGTACCTCGTTTTCTCT |
| | ATGAGGGACGCAAAGAGGGAACTAAACAC | | CGTTGGAGGGAGAAGAAACGGGATACCA |
| | TTAATTGGTGT | | AAAATAAAGAC |
| 1835 | AAGTGTAATATGTTTGGGTATGGGGAAGT | 1891 | GAAAAAAAGTGTACATGGTAGAGAGTTA |
| | GAATCAGTACAATCGCCACAGTACACTTA | | AACCAGTTTAATACTCCACCATGTACAC |
| | TGTCAGCCTA (rev comp) | | GAAGTGAAAA (rev comp) |
| 1836 | AATGAGCTAAAAGCTGTGGCCCAGTCATC | 1892 | TTTATTTAATGTAGTTAGGTTGTGTTTA |
| | AATTGACCAAACCATGGTGTTTGAAATGC | | ATTGACCAAACACTATATAACTACAATA |
| | ACTGCCGCCA (rev comp) | | AAAGAGCACA (rev comp) |
| 1837 | ACAATCAACAAAGATGTATGGCGGTACAT | 1893 | TAACTTATGTACGGAAGTATAGACACTT |
| | GCATTAATATCGGATGTATACCGACTAAA | | GATTAATATTTAATGTGTATACTTCCGT |
| | ACATTAATTC (rev comp) | | ATTTTTATAG (rev comp) |
| 1838 | ACAATCGTCAGATAATTTTGGCGGTACAT | 1894 | TTAATAAACTATGGAAGTATGTACAGTC |
| | GCATAAATCACGGCTGTATCCCCTCTAAA | | TTGCAATGTTGAGTGAACAAACTTCCAT |
| | GTGCTCGTGC | | AATAAAATAA |
| 1839 | ACCAGCTGTAACTTTTTCGGATCAAGCTA | 1895 | TAGATTATTTAGTACCTCGTTATCTCTC |
| | TGAGGGACGCAAAGAGGGAACTAAACACT | | GCTGGACGGAGACGAATCGAGAAACTAA |
| | TAATTGGTGTT | | AATTATAAATA |
| 1840 | ACCGTAAAATAGCATTTCAGTTTTTCCAG | 1896 | GTTATCTTTTTATGTATTCATTTCGGGC |
| | CCCCGCACACAGCCCAAATAAAAAAAGAG | | TATTCAAGTAGCTGGTCTTGAATACCGA |
| | TCTTTCTTCT (rev comp) | | AAAAAATTCA (rev comp) |
| 1841 | AGCAACGCCAGATAGAACAGCATGATCTT | 1897 | AGCATGGTTTGTATATTGGCTAACGTTC |
| | CGGGTTGCCGAGCGTGACCAGCGTGCCGG | | GGGTTGCCGAGCGTTAGCCAATATACAT |
| | CCGCGAACATG (rev comp) | | ATTAACAGGGC (rev comp) |
| 1842 | AGCTTTCATTGCGCGACGGATGGGCTATA | 1898 | TATTTATATAAAATAGTGTTTTTGTAAA |
| | GGTACACATCAGGTTACAGTAACATTGAA | | GTACACATCACCATATTTGACAAAAAAC |
| | AAAGGAACTG | | CTATAAATAA |
| 1843 | ATAATCATCAAAGATTTTAGGATTATCAA | 1899 | TACTTTAATTTTAGGTTAATGGTCCATT |
| | ATTCACTATGATACGCCCTTCCGAAAGCT | | TCCTCTAGTAAATGTTTTATTAACCCAA |
| | GATACTAACGA (rev comp) | | AAAAAGAGTCT (rev comp) |
| 1844 | ATAATCATCAAAGATTTTCGGATTATCAA | 1900 | TACTTTAATTTTAGGTTAATGGTCCATT |
| | ATTCACTATGATATGCCCTGCTGAAAGCT | | TCCTCTAGTAAATGTTTAATTAACCCAA |
| | GATACTAACGA | | AAAAAGAGTCT |
| 1845 | ATCTTTTAACTGCAAAAGTACTACGGTCT | 1901 | CCACACGTGTAAGCAGTCCTACACACTC |
| | CTACATGAGCTGTTTGCGGGAACATATCG | | GATGTGCGTTGAGAGTACACTCTGTATC |
| | ACTGGTTGCA | | TTCCTACTAT |
| 1846 | ATCTTTTAACTGCAAAAGTACTACGGTCT | 1902 | CCACACGTGTAAGCAGTCCTACACACTC |
| | CTACATGAGCTGTTTGCGGGAACATATCG | | GATGTGCGTTGAGAGTACACTCTGTATC |
| | ACTGGTTGCA (rev comp) | | TTCCTACTAT (rev comp) |
| 1847 | ATGAATTAATGTTTTAGTAGGTATACATC | 1903 | TATAAAAAATACGGAAGTATACACATTA |
| | CGATATTAATGCATGTACCACCATACATC | | AATATTAATCAGGTGTCTATACTTCCGT |
| | TTTGTTGATT (rev comp) | | ACATACGTTA (rev comp) |
| 1848 | ATGTACGAGTACTTTAGACGGGATACAAC | 1904 | GTATAAATATATGGAAGTACACACATTA |
| | CGTGGTTAATGCACGTGCCGCCATAGTTA | | TACATTGCTCAATTGTGCATACTTCCAT |
| | TCTGATGATT | | ACTAAATTAA |
| 1849 | ATTTAACATCAATGAACCTGAACCCATGG | 1905 | CACGGCATTGTATTAAACTCAGTAAGAT |
| | TTGGATCAAAAACACTAAAGAATCGTCGT | | TATTTCTATGTTCCTACTGATTTTGATA |
| | TCTTTTTGAT (rev comp) | | CAAAAGAAAA (rev comp) |
| 1850 | ATTTAACATCAATGAACCTGAACCCATGG | 1906 | CACGGCATTGTATTAAACTCAGTAAGAT |
| | TTGGATCAAAAACACTAAAGAATCGTCGT | | TATTTCTATGTTCCTACTGATTTTGATA |
| | TCTTTTTGAT (rev comp) | | CAAAAGAAAA (rev comp) |
| 1851 | ATTTATTTCGTTCCGTGTTAGGTAATATT | 1907 | GTAGGCTCTTTTTGGGTTAATATAACAC |
| | ACGAGTAGCGAAGAAGGTCTGCCAAAAGA | | TCACTAGAGTCAATGTTCCTTTAACCCA |
| | AAATTTAGATT (rev comp) | | AAAATTAAAGG (rev comp) |
| 1852 | CACTCCCAAAGTCGGCTTCGTCAGTCTTG | 1908 | CCCCTAGTATAGGATGGGTTTCGTTAGG |
| | GATGCCCCAAGGCGCTGGTCGACTCCGAG | | GTGCCCCAACGAATAGAAAAGTAAACTA |
| | CGCATCCTCA | | GCTTTCAGCG |
| 1853 | CACTCCCAAAGTCGGCTTCGTCAGTCTTG | 1909 | CCCCTAGTATAGGATGGGTTTCGTTAGG |
| | GATGCCCCAAGGCGCTGGTCGACTCCGAG | | GTGCCCCAATGACTGCAAAAGTAAACTC |
| | CGCATCCTCA (rev comp) | | AATCTTTAAG (rev comp) |
| 1854 | CCATCATAAGATGCCTTTTTACCGACAAG | 1910 | AAAGCATTATTTAGGCACTACAACTAGT |
| | TATAGTTGTACATGCCATTATCAGTCTCC | | ATAGTTGTACATGAAAAACGCTGTATTT |
| | TTTACAAACG (rev comp) | | TTTTATCCAT (rev comp) |
| 1855 | CCATCATAAGATGCCTTTTTACCGACGAG | 1911 | AAAGCATTATTTAGGCACTACAACTAGT |
| | TATAGTTGTACATGCCATTATCGGTCTCC | | ATAGTTGTACATGAAAAACGCTGTATTT |
| | TTTACAAACG | | TTTTATCCAT |
| 1856 | CCATCATAAGATGCCTTTTTACCGACGAG | 1912 | AAAGCATTATTTAGGCACTACAACTAGT |
| | TATAGTTGTACATGCCATTATCAGTCTCC | | ATAGTTGTACATGAAAAACGCTGTATTT |
| | TTTACAAACG (rev comp) | | TTTTATCCAT (rev comp) |
| 1857 | CTGAGTGGGCGAACTATTTATCTTTTACA | 1913 | AATAATATTTTTATCCTTATTGACATAT |
| | ATGCCAAGCGGGTATAGCGGGAAGAAAGG | | GAGGAATCCCATGTATAATTAGGGGATA |
| | ACAAAATTTA (rev comp) | | AAAATAAAAA (rev comp) |
| 1858 | GAAACTATGGGGATTATAGCGTTTGAGGG | 1914 | GAATAGCTTTTTGCCATATTGACATACT |
| | AGCAAGTGCGGTTGGTAAGAGCACAACGT | | GCAAGTGCGGTGTATAATTAAGGCATAA |
| | GTCGTGAGTTA (rev comp) | | AATAAAAACTG (rev comp) |
| 1859 | GAAGGGAATAATAGCTCTGTTTTGCCTGC | 1915 | GTGGAATTTTTAGTATTCATAACGGGCT |
| | TCCACAAACTGCCCAAATCAAATATTCCG | | ATTCAAACAACCAATCATGAATACTAAA |
| | ACAGCCCTGGT | | ATTATCATAAA |
| 1860 | GACCACAATCCGCGTGTGGGCTTTGTATC | 1916 | GAAGCCGTATAGTATAGGAATGGTGTCG |
| | CCTTGGGTGCCCCAAGGCACTCGTCGATT | | CTTGGGTGCCCGTAGGATAGCAAAAGTA |
| | CGGAGCAGATC (rev comp) | | TACTCATCGCT (rev comp) |
| 1861 | GCGAACGCCACTGCGGCCCCATCAGCAGC | 1917 | TTACTGCGGTGTACATTATTGCATGACT |
| | AATGAACAGTCAGTCGTACCACCGCCGAT | | ACGAACAGTTATGTTATGATGTACACCA |
| | ATCCACCACCA (rev comp) | | CAGTTAATGGA (rev comp) |
| 1862 | GCGAACGCCACTGCGGTCCCATCAGCAGC | 1918 | TTACTGCGGTGTACATTCTTGCATGACT |
| | AATGAACAGTCAGTCGTACCACCGCCGAT | | ACGAACAGTTATGTTATGATGTACACCA |
| | ATCCACCACCA (rev comp) | | CAGTTAATGGA (rev comp) |
| 1863 | GCTGCCGATCACCGAGATCGCGTTCGCGT | 1919 | CTCTCCTGAAGTGTCAGTTGAGCGCCTT |
| | CCGGCTTCGCCAGCGTGCGGCAGTTCAAC | | CGGTTTTCCGAGTGCGCGTGAACTACAG |
| | GACACGATCC | | TTCTAGCATG |
| 1864 | GGAAATTAATGAGCCGTTTGACCACTGAT | 1920 | CAGGGTTACTTTATACAACATTAATCTG |
| | CTTTTTGAAATTTCGGAAGTGGCGCATCA | | TATTTGAAAATAAAGAGCAATGTTGTAC |
| | TGGTCCAGAAG | | ATCAAGATACA |
| 1865 | GGAAATTAATGAGCCGTTTGACCACTGAT | 1921 | TAGTAATATTATATGCAACATTATTCTG |
| | CTTTTTGAAATTTCGGAAGTGGCGCATCA | | TATTTGAAAATAAAGAGCAATGTTGTAC |
| | TGGTCCAGAAG (rev comp) | | ATCAAGATACA (rev comp) |
| 1866 | GGTGAGGATGCGCTCGGAGTCGACCAGCG | 1922 | CGCTGAAAGCTAGTTTACTTTTCTATTC |
| | CCTTGGGGCATCCAAGACTGACGAAGCCG | | GTTGGGGCACCCTAACGAAACCCATCCT |
| | ACTTTGGGAG | | ATACTAGGGG |
| 1867 | GGTGAGGATGCGCTCGGAGTCGACCAGCG | 1923 | CGCTGAAAGCTAGTTTACTTTTCTATTC |
| | CCTTGGGGCATCCAAGACTGACGAAGCCG | | GTTGGGGCACCCTAACGAAACCCATCCT |
| | ACTTTGGGAG (rev comp) | | ATACTAGGGG (rev comp) |
| 1868 | GTCTTCTGGACCATGATGCGCTACTTCCG | 1924 | TGTATCTTGATGTACAACATTGCTCTTT |
| | AAATTTCAAAAAGATCAGTGGTCAAACGG | | ATTTTCAAATACAGAATAATGTTGCATA |
| | CTCATTAATTT | | TAATATCACTA |
| 1869 | GTGGATCACCTGGTTTTTCGTGTTCAGAT | 1925 | CTCCTTTTATTAGGGTTTGTGTCATCTA |
| | ACAGGCATACGAAGTGCTCCTGAGACAGA | | CACACATGTAAAGTTTACATAAACCCTA |
| | AAGCGCATAT | | AAAAGATCGA |
| 1870 | TAACACCAATTAAATGTTTAGTTCCCTCT | 1926 | GTCTTTATTTTTGGTATCCCGTTTCTTC |
| | TTGCGTCCCTCATAGCTTGATCCGAAAAA | | TCCCTCCAACGAGAGAAAACGAGGAACT |
| | GTTACAGCTGG (rev comp) | | AAACAATCTAA (rev comp) |
| 1871 | TAACACCAATTAAGTGTTTAGTTCCCTCT | 1927 | GTCTTTATTTTTGGTATCCCGTTTCTTC |
| | TTGCGTCCCTCATAGCTTGAACCGAAAAA | | TCCCTCCAACGAGAGAAAACGAGGAACT |
| | GTTACAGCTGG | | AAACAATCTAA |
| 1872 | TAACACCAATTAAGTGTTTAGTTCCCTCT | 1928 | ATGTTCTTTTTTGGTATCTCGTTTATTC |
| | TTGCGTCCCTCATAGCTTGATCCGAAAAA | | TTCTTCCAACGAGAGGAAACGAGGAACT |
| | GTTACAGCTGG (rev comp) | | AAACAATCTAA (rev comp) |
| 1873 | TAACACCAATTAAGTGTTTAGTTCCCTCT | 1929 | TGTTCTTTTTTTGGTATCTCGTTTCTTC |
| | TTGCGTCCCTCATAGCTTGATCCGAAAAA | | TTCTTCCAACGAGAGGAAATGAGGCACT |
| | GTTACAGCTGG (rev comp) | | AAACCAGTTGA (rev comp) |
| 1874 | TACAAAGTAGATGTCTTTTGTAGCCATTA | 1930 | CGTTCGTGCTTTGTCGTCACCTTGTTGG |
| | GGCGCATTAGATTTACTCCATTAAGCCCC | | TGTAATTAGGTTGACGCCAACAGGGTGA |
| | AACGCATCAT (rev comp) | | TGACAATATA (rev comp) |
| 1875 | TACCCGTTGCTTCGTTGTAGCAACACTAC | 1931 | TTTCTAAGCTTTTACAAGCAGAGCAACA |
| | GCACTCCACGTGATGCGTATTTGGAAATA | | CACTCCACGTGTGGTGATAGGTCTTACC |
| | AATCAGCCGGC (rev comp) | | CATATTATGGA (rev comp) |
| 1876 | TACCCGTTGCTTCGTTGTAGCAACACTAC | 1932 | TTTCTAAGCTTTTACAAGCAGAGCAACA |
| | GCACTCCACGTGATGCGTATTTGGAAATA | | CACTCCACGTGTGGTGATAGGTCTTACC |
| | AATCAGCCGGC (rev comp) | | CATATTATGGA (rev comp) |
| 1877 | TATCTTTTAACTGCAAGAGTACTACAGTT | 1933 | TCTACACGAGTAAGCAGACCTACACACT |
| | TCCACGTGAGCTGTTTGCGGGAACATATC | | CGATGTGCATTGACTGTCTACTTAGTAT |
| | GACGGGTTGCA (rev comp) | | CTTCCTACTAT (rev comp) |
| 1878 | TATCTTTTAACTGCAAGAGTACTACGGTT | 1934 | TCTTGGCGAGTGAGCAGACCTATACACT |
| | TCCACGTGAGCTGTTTGCGGGAACATATC | | CGATGTGCGTTGACTGTCTACTTAGTAT |
| | GACGGGTTGCA (rev comp) | | CTTCCTACTAT (rev comp) |
| 1879 | TATCTTTTAACTGCAAGAGTACTACGGTT | 1935 | TCCACACGTGTAAGCAGTCCTACACACT |
| | TCCACGTGAGCTGTTTGCGGGAACATATC | | CGATGTGCGTTGAGAGTACACTCTGTAT |
| | GACGGGTTGCA (rev comp) | | CTTCCTACTAT (rev comp) |
| 1880 | TATGCAACCCGTCGATATGTTCCCGCAAA | 1936 | ATAGTAGGAAGATACTAAGTAGACAGTC |
| | CAGCTCACGTGGAAACCGTAGTACTCTTG | | AACGCACATCGAGTGTATAGGTCTGCTC |
| | CAGTTAAAAGA (rev comp) | | ACTCGCCAAGA (rev comp) |
| 1881 | TATGCAACCCGTCGATATGTTCCCGCAAA | 1937 | ATAGTAGGAAGATACTAAGTAGACAGTC |
| | CAGCTCACGTGGAAACCGTAGTACTCTTG | | AACGCACATCGAGTGTATAGGTCTGCTC |
| | CAGTTAAAAGA (rev comp) | | ACTCGCCAAGA (rev comp) |
| 1882 | TCCCTTAGGTGCTAATAGCGCCACTAATT | 1938 | CCACACGTGTAAGCAGTCCTACACACTC |
| | CCACATGATGTGTTTGTGGGAATAAATCG | | GATGTGCGTTGAGAGTACACTCTGTATC |
| | ACTGGTTGTA (rev comp) | | TTCCTACTAT (rev comp) |
| 1883 | TCCCTTAGGTGCTAATAGCGCCACTAATT | 1939 | CCACACGTGTAAGCAGTCCTACACACTC |
| | CCACATGATGTGTTTGTGGGAATAAATCG | | GATGTGCGTTGAGAGTACACTCTGTATC |
| | ACTGGTTGTA (rev comp) | | TTCCTACTAT (rev comp) |
| 1884 | TCGGGGCACGGTATTGGTGATTCACGAGA | 1940 | TATTAGTTAGATGTCATAGACCGATTTA |
| | ACAAGGGGCTCAACGACTGGGTTCGGTCC | | CAGCGGACTGTAGGTTGATCTAGGACAC |
| | GTCGCGGGAC (rev comp) | | CTAACCAATA (rev comp) |
| 1885 | TTATTCTCTAATAAGTTTAACTACAGTCT | 1941 | GTGCTTTAGTCAACAATACTACGCTCTC |
| | CACAATGTGGCGTATTTGGGAACATATCC | | AACGTGGCTCGGTTCTCCAATGACCAAC |
| | ATACACTTAA (rev comp) | | CTATTCAACA (rev comp) |
| 1886 | TTATTCTCTAATAAGTTTAACTACAGTCT | 1942 | GTGCTTTAGTCAACAATACTACGCTCTC |
| | CACAATGTGGCGTATTTGGGAACATATCC | | AACGTGGCTCGGTTCTCCAATGACCAAC |
| | ATACACTTAA (rev comp) | | CTATTCAACA (rev comp) |
| 1887 | TTTAAATTTTGTCCTTTCTTCCCGCTATA | 1943 | TTTTTATTTTTATCCCCTAATTATACAT |
| | CCCACTTGGCATTGTAAAAGATAAATAGT | | GGCATTCCTCATATGTCAATAAGGATAA |
| | TCGCCCACTC (rev comp) | | AAATATTATT (rev comp) |
| 1954 | TAACACCAATTAAATGTTTAGTTCCCTCT | 1959 | GTCTTTATTTTTGGTATCCCGTTTCTTC |
| | TTGCGTCCCTCATAGCTTGATCCGAAAAA | | TCCCTCCAACGAGAGAAATCGAGGTACT |
| | GTTACAGCTGG (rev comp) | | AAACAAGCTAA (rev comp) |
| 1955 | ACAATCATCAGATAACTATGGCGGCACGT | 1960 | TTAATTTAGTATGGAAGTATGCACAATT |
| | GCATTAACCACGGTTGTATCCCGTCTAAA | | GAGCAATGTATAATGTGTGTACTTCCAT |
| | GTACTCGTAC (rev comp) | | ATATTTATAC (rev comp) |
| 1956 | AATGTTTGTAAAGGAGACTGATAATGGCA | 1961 | ATGGATAAAAAAATACAGCGTTTTTCAT |
| | TGTACAACTATACTCGTCGGTAAAAAGGC | | GTACAACTATACTAGTTGTAGTGCCTAA |
| | ATCTTATGAT (rev comp) | | ATAATGCTTT (rev comp) |
| 1957 | GTCTTCTGGACCATGATGCGCCACTTCCG | 1962 | TGTATCTTGATGTACAACATTGCTCTTT |
| | AAATTTCAAAAAGATCAGTGGTCAAACGG | | ATTTTCAAATACAGATTAATGTTGTATA |
| | CTCATTAATTT (rev comp) | | AAGTAACCCTG (rev comp) |
| 1958 | TTTAAATTTTGTCCTTTCTTCCCGCTATA | 1963 | TTTTTATTTTTATCCCCTAATTATACAT |
| | CCCGCTTGGCATTGTAAAAGATAAATAGT | | GGCATTCCTCATATGTCAATAAGGATAA |
| | TCGCCCACTC (rev comp) | | AAATATTATT (rev comp) |

*revcomp:thereversecomplementsequencealignstothefirstdeclaredtargetsitemostclosely

[0232] All references, patents and patent applications disclosed herein are incorporated by reference with respect to the subject matter for which each is cited, which in some cases may encompass the entirety of the document.

[0233] The indefinite articles “a” and “an,” as used herein in the specification and in the claims, unless clearly indicated to the contrary, should be understood to mean “at least one.”

[0234] It should also be understood that, unless clearly indicated to the contrary, in any methods claimed herein that include more than one step or act, the order of the steps or acts of the method is not necessarily limited to the order in which the steps or acts of the method are recited.

[0235] In the claims, as well as in the specification above, all transitional phrases such as “comprising,” “including,” “carrying,” “having,” “containing,” “involving,” “holding,” “composed of,” and the like are to be understood to be open-ended, i.e., to mean including but not limited to. Only the transitional phrases “consisting of” and “consisting essentially of” shall be closed or semi-closed transitional phrases, respectively, as set forth in the United States Patent Office Manual of Patent Examining Procedures, Section 2111.03.

[0236] The terms “about” and “substantially” preceding a numerical value mean±10% of the recited numerical value.

[0237] Where a range of values is provided, each value between the upper and lower ends of the range are specifically contemplated and described herein.

The application's sequence listing, which the Patent Office published only in electronic form, follows.

SEQUENCE LISTING (1963 sequences)

SEQ ID NO: 1 - protein, 464 aa, Artificial Sequence
  Synthetic
MKRAALYIRVSTMEQAKEGYSIPAQTDKLKAFAKAKDMAVAKVYTDPGFSGAKMERPALQEMISDIQNKKIDVVLVYKLDRLSRSQKNTLYLIEDVFLKNNVDFISMQESFDTSTPFGRATIGMLSVFAQLERDTITERMHMGRTERAKQGYYHGSGIVPLGYDYVHGELIINDYEAQIIQEIYDLYVNQGKGQQYITKRMVAKYPDKVKTLTIVKYALTNPLYIGKISWDGKVYDGHHSPIIDKSMYDKAQEIIARMAQKGGEQHGNQLGLLLGITYCGKCGAEVFRYVSGGKKYRYNYYMCRSVKKMLPSLVKDWNCKQPSLRQEVVEKKVIDSLKSLDFKKIERELKQVENKTKSKITTINNQISKKHNEKQKILDLYQYGTFDVTMLNERMKKIDNEINALTANIANLEGTKSESLINKLETLKTFNWETETTENKILIIKEFVERIELFDDEVIIKYKF

SEQ ID NO: 2 - protein, 500 aa, Artificial Sequence [sequence omitted]

SEQ ID NO: 3 - protein, 481 aa, Artificial Sequence
  Synthetic
MKYAVYVRVSTDRDEQVSSVENQIDICRYWLEKNGYEWDPNAVYFDDGISGTAWLERHAMQLILEKARRNELDTVVFKSIHRLARDLRDALEIKEILIGHGIRLVTIEENYDSLYEGGNDIKFEMFAMFAAQLPKTISVSVSAAMQAKARRGEFIGKPGLGYDVIDKKLVINEKEAEIVREIFDLSYKGYGFKKIANILNDKGTYTKFGQLWSHTTVGKILKNQTYKGNLVLNSYKTVKVDGKKKRVYTPKERLTIIEDHYPTIVSKELWNAVNSDRASKKKTKQDTRNEFRGMMFCKHCGEPITAKYSGRYAKGSKKEWVYMKCSNYIRFNRCVNFDPAHYDDIREAIIYGLKQQEKELEIHFNPKMHQKRNDKSTEIKKQIKLLKVKKEKLIDLYVEGLIDKEMFSKRDLNFENEIKEQELALLKLTDQNKRNKEEKKIKEAFSMLDEEKDMHEVFKTLIKKITLSKDKYIDIEYTFSL

SEQ ID NO: 4 - protein, 474 aa, Artificial Sequence
  Synthetic
MNLMDENTPKNVGIYVRVSTEEQAKEGYSISAQKEKLKAYCISQGWDSYKFYIDEGKSAKDIHRPSLELMLRHIEQGIIDTVLVYRLDRLTRSVRDLYSLLDYFDKYQAVFRSATEVYDTGSATGRLFITLVAAMAQWERENLGERVKMGQVEKARQGQFSAPAPFGFTKEGESLVKNPEEGEVLLDMIDKIKKGYSLRELADYLDESDAIPKRGYKWHIASILVILKNPVLYGGFRWAGEILEGAFEGYISKKEFEQLQKMLHDRQNFKRRETSSIFIFQAKILCPNCGSRLTCERSIYFRKKDNKNVESNHYRCQACALNKKPAIGISEKKFEKALIEYMQNANFKREPKIPQEKQQDYDKLHQKIISIEKQRKKYQKAWSMELMTDQEFEQLMAETKEALQKALAKLEQNDLHPIEKPLNIERAKELAKMFRENWSVLTGEEKRQTVQELIKHIEFEKKDNKARILDIHFY

SEQ ID NO: 5 - protein, 470 aa, Artificial Sequence
  Synthetic
MTISGGTDEALFYFRISLDATGERLGVERQEPPCLELCRSKGFTPGKAYIDNDLSATKEGVVRPEFEALLRDLKLRPRPVIVWHTDRLVRVTKDLERVISTGVNVYAVHAGHFDLSTPAGRAVARTLTAWAQYEGEQKALRQKEANLQRAQMGKPWWPRRPFGLEKDGELNEPEALSLRKAYADLLSGASLTDLAADLNAAGHTTNKGGAWTSTSLRPVLMNARNAAIRTYDGEEIGPANWKAIVPEETWRAAVRLLSSPSRKTGGGGKRLHLMTGVAKCSVCDSDVKVEWRGKKGEPTAYTVYACRGKHCLSHRQKWVDDRVETLVLERLSQEDAAAVWAVDNDTELADVREEVVTMRERLEAFAEDYADGAISRAQMQAGSARVREKLEAAEAQMAYLAAGSPLGELIASNDVEKTWESLTLDRKRAVIEAMTRKVTLYPRGRGIRSHRPEDCQVEWVDERPRLSAVS

SEQ ID NO: 6 - protein, 487 aa, Artificial Sequence
  Synthetic
MAYAVYVRVSSDKDEQVSSVENQIDICRYWLENNGFEWDENAVYFDDGISGTAWLERHAIQLVLEKARKKEIDTVVFKSIHRLARDLKDALEIKEILLGHGVRLITIEEGYDSHYEGKNDMKFEMYAMFASQLPKTLSVSITAALAAKVRRGGYTGGFVPYGYEIIDGKYAINEEEAALVREIFELYAQGFGYIKIANTINDKGARTRKGAPWTFSTLSKMIKNPAYKGTYIMQKYGTVKVNGRKKKVINPKEKWVIFEGHHPAIISHELWEKVNNKDPNKFKKKRRVSTTNELRGITVCAHCGTAMSKRNSINVSKNGRETEYSYMICNWSRITARRECVRHVPIHYKDLRALVLSKLKEKERELDKEFCSDENQLQVKLRKLKKDINDLKFKRERLLDLYLEDERIDKDTFTIRNAKIEKEIGLKEMEIRKASNIEIQMKEKQEVRDAFALLEESKDLHSVFQKLIKRIEVAQDGAIDIYYRFEE

SEQ ID NO: 7 - protein, 547 aa, Artificial Sequence
  Synthetic
MWACSHLRADGTTPTSSSTLLTMSARDYDIEAEWTPADLALLKELEEAEALLPADAPRALLSVRLSVFTDDTTSPVRQELDLRQLAREKGHRVVGLASDLNVSATKVPPWKRKSLGDWLNNRAPEFDALLFWKIDRFIRNLNDLNVMIRWSETYSKNLISKNDPIDLTTTMGKMMVSLLGGVAEIEAANTKTRVESLWDYTKTQGEWHVGKPPFGYKTARDEAGKVVLVEDPLAVETLHTARELVMSGMSTTAAAKVLKERGLISSTTATLTRRLRNPGVLGLRVEEDKDGGIRRSKLILGRDGQPIRIADPIFTEEQFEELQAVLDKRGKRQPHRQPGGATSFLGVLKCAVCETNMINHYTRNRHGDYAYLRCQGCKSGGYGAPNPQEVYDRLVEQVLAVLGDFPVEMREYARGEEKRKELKRLEESIAYYMKELEPGGRFTKTRFTQDQAEGTLDKLIAELEAIDPESAKDRWVYVAGGKTFREHWEEGGIDAMSADLIRAGIMCQVTRTKVPKVRAPQVHLKLMIPKDVRTRLVIRPDDFGQTF

SEQ ID NO: 8 - protein, 470 aa, Artificial Sequence
  Synthetic
MSKRAVIYTRVSRDDTGEGQSNQRQEAECRRLTDYRRLDVVAVEADISISASKGLERPAWLRVLGMIERGEVDYVIAYHMDRVTRSMTELEQLIEMCLKYDVGVATVSGDIDLTTDVGRMVARIIGAVARAEVERKSARQKLANAQRAAEGKPHVSGIRPFGYADDHRQVVTIEAQAIRAAAEAALAGESMIGIAESWSKDGLLSARARRGHDKGNRPTKAAWSARGVRNVLVNPRYAGIRFYNGERVGQGDWEPILDVETHLRLVEKLTDPTRRKGTVKTGRVAASLLTAIARCEVCGQTVRASSVRGRQTYACRNSHAHVDRSTADLMTQEWVISRLADPDTLAKLAPSGDDRVDEAKATIEKRREALKTYARLLATGAMDEDQFTEASAVARSEMQEAEAVLTEAGTGDLLAGLDVGSDAVGPQFLALSLARQRGIVEALVDVTLRPASKARKVVTPEHERVILADR

SEQ ID NO: 9 - protein, 487 aa, Artificial Sequence
  Synthetic
MKYAVYVRVSTDRDEQVSSIENQIDICRYWIEKNGYEWDENSIYKDEAVSGTAWLERRAMQLILGKARKKELDTVVFKSIHRLGRDLRDALEIKEILLGHGVRLVTIEEGYDSYYEGKNDLKFEMYAMFASQLPKTLSVSISAALAAKVRRGEYTGGTVPYGYKIVDKKYVINQEEAEIVREMYELYDNGLGYLRISNALNDVGKYKRSGKLWTYSAVKLIITNPMYKGDYVMGRSTEVKVDGRKKRIQEPREKWVVFENHHPAIIERPLWDKINNPKINKKIKRRVAVTNELRGIARCIHCGSPFVLHTYKYKNKEGEELNYGYLTCGTYKLTGGRGCVKHSGLRYERLRSLVLRKLKEKERDLEKVFKLNDKDKHQEKQKKLRKEKKELEIKRERLLDLYLDGGSIDKETFTKRDANFAKNIKEKELEILKLDDVKALIVEQQKVKDAFKLLEDSENLYPVFKKLIAGIDISQNGAVDIRYRFEE

SEQ ID NO: 10 - protein, 529 aa, Artificial Sequence
  Synthetic
MSNRLHEYDVEAEWSPADLALLRSLEEAESLLPESAPRALLSVRLSVFTEDTTSPVRQELDLRQLARDKGMRVVGVASDLNVSATKVPPWKRKSLGTWLNDRVPEFDALLFWKVDRFIRNMSDLSRMIDWSNRYEKNLISKNDPIDLSTPLGKMMVTLLGGIAEIEAANTKARVESLWDYNKTQSEWLVGKPPYGYTTARDEQGKNRLVIDPKASEALHLTRLHLLEGGSVRSFVPVLKEKGLVSTGLTPSTLIRRLRNPALLGYRVEEDKKGGLRRSKVVVGHDGQPIVIADPIFTREEWDTLQAAMDARNKNQPPRQPSGATKFRGVLKCVECGTNMIVHHTRNKHGEYAYLRCQGCQSGGLGSPHPQDVYDALVGQVLTVLGDWPVQTREYARGAEARAETKRLEETIAVYMKGLEPGGRYTKTRFTMEQAEATLDKLIAELEAIDPDTTTDRWVYVAGGKTFREHWEEGGMDAMTSDLLRAGITATVTRTKIPKVRAPKVELDLDIPKDVRERLIVREDDFAETF

SEQ ID NO: 11 - protein, 458 aa, Artificial Sequence
  Synthetic
MNYERSYLRSCQVSTLEQKEHGYSIEEQERKLKSFCEINDWSISDVFIDAGFSGAKRDRPELQRMMKDIKRFDLVLVYKLDRLTRNVRDLLDLLEIFEQNNVAFRSATEVYDTSTAMGRLFVTLVGAMAEWERETIRERVMMGKRAAIKQGMILTPPPFYYDRVDNTYIPNDYKKVVLWAYDEVLKGVSSKGIARKLNDSDIPPPNGKRWEDRTITRALRSPITRGHYTWGDVFIENSHEPIITEEMYQQIKERLEERINTKIVSHVSVFRGKFICPRCGGTLTMNTATRKRKKGYVTYKTYYCNTCKGKKESFGFAENEALRVFRDYLSKLDLDKYEVKTKQKDDVVTIDIDKVMEQRKRYHKLYAKGLMQEEELFELIKETDETIAEYEKQKELVPRKTLDVDKIKKFKNVLLESWKIFSSEDKADFIKMAIKSIDIEYVKFKNRHSIKINDIEFY

SEQ ID NO: 12 - protein, 469 aa, Artificial Sequence
  Synthetic
MNRGGPTVRADIYVRISLDRTGEELGVERQEESCRELCKSLGMEVGQVWVDNDLSATKKNVVRPDFEAMIASNPQAIVCWHTDRLIRVTRDLERVIDLGVNVHAVMAGHLDLSTPAGRAVARTVTAWATYEGEQKAERQKLANIQNARAGKPYTPGIRPFGYGDDHMTIVTAEADAIRDGAKMILDGWSLSAVARYWEELKLQSPRSMAAGGKGWSLRGVKKVLTSPRYVGRSSYLGEVVGDAQWPPILDPDVYYGVVAILNNPDRFSGGPRTGRTPGTLLAGIALCGECGKTVSGRGYRGVLVYGCKDTHTRTPRSIADGRASSSTLARLMFPDFLPGLLASGQAEDGQSAASKHSEAQTLRERLDGLATAYAEGAISLSQMTAGSEALRKKLEVIEADLVGSAGIPPFDPVAGVAGLISGWPTTPLPTRRAWVDFCLVVTLNTQKGRHASSMTVDDHVTIEWRDVAE

SEQ ID NO: 13 - protein, 461 aa, Artificial Sequence
  Synthetic
MKVAVYCRVSTLEQKEHGHSIEEQERKLKSFCDINDWTVYDTYIDAGYSGAKRDRPELQRLMNDINKFDLVLVYKLDRLTRNVRDLLDLLEIFEKNDVSFRSATEVYDTTTAMGRLFVTLVGAMAEWERETIRERTQMGKLAALRKGIMLTTPPFYYDRVDNKFVPNKYKDVILWAYDEAMKGQSAKAIARKLNNSDIPPPNNTQWQGRTITHALRNPFTRGHFDWGGVHIENNHEPIITDEMYEKVKDRLNERVNTKKVRHTSIFRGKLVCPVCNARLTLNSHKKKSNSGYIFVKQYYCNNCKVTPNLKPVYIKEKEVIKVFYNYLKRFDLEKYEVTQKQNEPEITIDINKVMEQRKRYHKLYASGLMQEDELFDLIKETDQTIAEYEKQNENREVKQYDIEDIKQYKDLLLEMWDISSDEDKEDFIKMAIKNIYFEYIIGTGNTSRKRNSLKITSIEFY

SEQ ID NO: 14 - protein, 552 aa, Artificial Sequence
  Synthetic
MPGMTTETGPDPAGLIDLFCRKSKAVKSRANGAGQRRKQEISIAAQETLGRKVAALLGMQVRHVWKEVGSASRFRKGKARDDQSKALKALESGEVGALWCYRLDRWDRGGAGAILKIIEPEDGMPRRLLFGWDEDTGRPVLDSTNKRDRGELIRRAEEAREEAEKLSERVRDTKAHQRENGEWVNARAPYGLRVVLVTVSDEEGDEYDERKLAADDEDAGGPDGLTKAEAARLVFTLPVTDRLSYAGTAHAMNTREIPSPTGGPWIAVTVRDMIQNPAYAGWQTTGRQDGKQRRLTFYNGEGKRVSVMHGPPLVTDEEQEAAKAAVKGEDGVGVPLDGSDHDTRRKHLLSGRMRCPGCGGSCSYSGNGYRCWRSSVKGGCPAPTYVARKSVEEYVAFRWAAKLAASEPDDPFVIAVADRWAALTHPQASEDEKYAKAAVREAEKNLGRLLRDRQNGVYDGPAEQFFAPAYQEALSTLQAAKDAVSESSASAAVDVSWIVDSSDYEELWLRATPTMRNAIIDTCIDEIWVAKGQRGRPFDGDERVKIKWAART

SEQ ID NO: 15 - protein, 461 aa, Artificial Sequence
  Synthetic
MKVAIYTRVSTLEQKEKGHSIEEQERKLRAYSDINDWKIHKVYTDAGYSGAKKDRPALQEMLNEIDNFDLVLVYKLDRLTRSVKDLLEILELFENKNVLFRSATEVYDTTSAMGRLFVTLVGAMAEWERTTIQERTAMGRRASARKGLAKTVPPFYYDRVNDKFVPNEYKKVLRFAVEEAKKGTSLREITIKLNNSKYKAPLGKNWHRSVIGNALTSPVARGHLVFGDIFVENTHEAIISEEEYEEIKLRISEKTNSTIVKHNAIFRSKLLCPNCNQKLTLNTVKHTPKNKEVWYSKLYFCSNCKNTKNKNACNIDEGEVLKQFYNYLKQFDLTSYKIENQPKEIEDVGIDIEKLRKERARCQTLFIEGMMDKDEAFPIISRIDKEIHEYEKRKDNDKGKTFNYEKIKNFKYSLLNGWELMEDELKTEFIKMAIKNIHFEYVKGIKGKRQNSLKITGIEFY

SEQ ID NO: 16 - protein, 519 aa, Artificial Sequence
  Synthetic
MQLDATLTLRDEGLSAFHQRHIKQGALGVFLRAIEDGRIQPGSVLIVEGLDRLSRAEPIQAQAQLAQIINAGITVVTASDGREYNRERLKAQPMDLVYSLLVMIRAHEESDTKSKRVKAAIRRQCEGWVAGTWRGIIRNGKDPHWVRLGEHGKFEHVPERVLAVRTMIDLFLEGHGAIEITRRLTEQNLYVSNAGNYSVHMYRIVRNQALIGEKRISVDGEEFRLDGYYPPILTREEFAELQQTMSERGRRKGKGEIPNIITGLSITVCGYCGRAMTTQNSKARAPKGKSVVRRLSCPMNSFNEGCPIGGSCESEIVERALMRYCSDQFNLSRLLEGDDGTARRTAQLAVARQRASDIEAQIQRVTDALLSDDGKAPAAFTRRARELETQLEEQRREIEALEHQIAASSAHGIPAAAEAWAQLVDGVLALDYDARMKARQLVADTFRKIVVYQRGFAPIDDAAADRWKRSGTIGLMLVTKRGGMRLLNVDRRTGCWQAEDDLDPSLIPSDGLPMLPLDA

SEQ ID NO: 17 - protein, 452 aa, Artificial Sequence
  Synthetic
MKAAIYIRVSTQEQIENYSIQAQTEKLTALCRSKDWDVYDIFIDGGYSGSNMNRPALNEMLSKLHEIDAVVVYRLDRLSRSQRDTITLIEEYFLKNNVEFVSLSETLDTSSPFGRAMIGILSVFAQLERETIRDRMVMGKIKRIEAGLPLTTAKGRTFGYDVIDTKLYINEEEAKQLQMIYDIFEEEKSITSLQKRLKKLGFKVKSYSSYNNWLTNDLYCGYVSYADKVHTKGVHEPIISEEQFYRVQEIFSRMGKNPNMNRDSASLLNNLVVCSKCGLGFVHRRKDTVSRGKKYHYRYYSCKTYKHTHELEKCGNKIWRADKLEELIIDRVNNYSFASRNVDKEDELDNLNEKLKTEHTKKKRLFDLYISGSYEVSELDAMMADIDAQINYYEAQIEANEELKKNKKIQENLADLATVDFDSLEFREKQLYLKSLINKIYIDGEQVTIEWL

SEQ ID NO: 18 - protein, 462 aa, Artificial Sequence
  Synthetic
MGKSITVIPAKKVQTSVLHQDRKKIKVAAYCRVSTDQEEQLSSYENQVNYYREFISKHEDYELVDIYADEGISATNTKKRDAFNRLIQDCRAGKVDRILVKSISRFARNTLDCIKYVRELKELGVGVTFEKENIDSLDSKGEVLLTILSSLAQDESRSISENATWGIRKKFERGEVRVNTTKFMGYDKDENGRLIINPQQAETVKFIYEKFLEGYSPESIAKYLNDNEIPGWTGKANWYPSAIQKMLQNEKYKGDALLQKTFTVDFLTKKRVQNDGQVNQYYVENSHEAIIDEETWETVQLEMARRKTYRDEHQLKSYIMQSEDNPFTTKVFCGACGSAFGRKNWATSRGKRKVWQCNNRYRIKGVEGCYSSHLDEATLEQIFLKALELLSENIDLLDGKWEKILAENRLLDKHYSMALSDLLRQEQIDFNPSDMCRVLDHIRIGLDGEITVCLLEGTEVDL

SEQ ID NO: 19 - protein, 509 aa, Artificial Sequence
  Synthetic
MPIAPEFLSLAYPGQEFPAYLYGRASRDPKRKGRSVQSQLDEGRATCLDAGWPIAGEFKDVDRSASAYARRTRDEFEEMIAGIQAGECRILVAFEASRYYRDLEAYVRLRRVCREAGVLLCYNGQVYDLSKSADRKATAQDAVNAEGEADDIRERNLRTTRLNAKRGGAHGPVPDGYKRRYDPDSGDLVDQIPHPDRAGLITEIFRRAAAAEPLAAICRDLNERGETTHRGKAWQRHHLHAILRNPAYIGHRRHLGVDTGKGMWAPICDDEDFAETFQAVQEILSLPGRQLSPGPEAQHLQTGIALCGEHPDEPPLRSVTVRGRTNYNCSTRYDVAMREDRMDAFVEESVITWLASDEAVAAFEDNTDDERTRKARIRLKVLEEQLEAAQKQARTLRPDGMGMLLSIDSLAGLEAELTPQIDKARQESRSLHVPALLRDLLGKPRADVDRAWNEALTLPQRRMILRMVVTIRLFKAGSRGVRAIEPGRITLSYVGEPGFKPVGGNRAKQ

SEQ ID NO: 20 - protein, 476 aa, Artificial Sequence
  Synthetic
MDRNKVAIYVRVSTQGQVDDGYSLDEQVDLLTNYCKLKEWTLYDVYVDPGISGKNMHRPEIERLTRDAKRKLFDIVLIYDLKRLGRSQKENIVLVEDVFNPNGIRLVSFTENFDASTPVGKMVFGMLSAYAELDRANIAERMMMGKIGRAKAGKAMSWGMPPFAYDYNKETGDLELDEVKAPIVEMIYSEFLKGASVNKIVQKLNSMSYHGKNHEWKHHAVTVIIDNPVYCGMMKYMGQTYQAKHTPIIDKKTFELAQLERKKRLSKYHDADWLGPFQRKYIGSKICYCGLCGAHLKSEKDKKNKLTGIRSISFFCPNTRSRGTGECTNPRFKQSVLEGYILNEVAKLQQNPEKLKDIKPAEDNELHNKIATYEKKIKQNSSKLSKLNDLYLNDLISLDDLKQQSKSLLNENEFMEEQIKLLSATTREDELRKKIDTFLAFPDILTADYDTQKQAVELVISRVEATKEGIDIFFNF

SEQ ID NO: 21 - protein, 352 aa, Artificial Sequence
  Synthetic
MINVVGYARYSSDNQREESIVAQERAIREFCQKNNYNLIKVYKDEAISGTSIKDRTEFLELIEDSKKKEFQCVVVHKFDRFARNRYDHAIYEKKLNDNGVKLLSVLEQLNDSPESVILKSVLTGMNEYYSLNLSREVKKGLNENALNCIHNGGIPPLGYNLDEDRRYIINEIEAETVRIIYKLYIEGIGYASIAEQLNQMGRLNKLGKPFRKTSIRDILLNEKYTGVFVYGKKDGHGKLTGNEVKIEGGIPQIISKEDFEKIQIKMKNRKTGSRATAHETYYLTGVCTCGECGGRYSGGYRSRQRDGSITYGYTCINRKTKVNDCRNKPIRKEILEEFVFKTIKKKYLQKRG

SEQ ID NO: 22 - protein, 520 aa, Artificial Sequence
  Synthetic
MKKITKIDELPQGQLPNTNLRVAAYARVSTDSDEQLESLKAQREHYERYIKSNPEWEFAGLYYDEGISGTKMEKRTELLRMIRNCKQGRIDFIITKSISRFARNTVDCLELVRKLIDIGVYIYFEKENLNTGDMESELMLSILSGFAAEESASISQNSTWSIQKRFQNGSYVGTPPYGYTNTDGEMVIVPEEAEIIKRIFTECLSGKGGGTIARGLNKDKIPARRGNHWSAGTVIDMLRNEKYMGDVLLQKTYTDSNYNRHPNTGEKDQYYYKDSHEAIISREDFAKAQDLIDERAKMKCKGVKKNVYLNRYALSGKIVCGECGRNFRRKTNYSAGRSYIAWSCIGHIEDKESCSMLFLRDGEIKATFTTMMNKLAFSNKLILEPLFKSISQIDEESDRERMDAIDKRMEQLMEERNTLITLMAKGFLEPALFNQERNVLDSEIKNLTTEKTNLVTNSTSGVLRANDIKDLIDYVSADNFNGDYTEELFEEFVENIIVNSRDELTFNLKCGLSLKEKVVR

SEQ ID NO: 23 - protein, 590 aa, Artificial Sequence
  Synthetic
MKVIQKIEPTKPKIAKRKRVAAYARVSVDKGRTMHSLSAQVSYYSKLIQKNPDWEYVGVYSDGGISGRTTESRNEFKRLIKDCKDGKVDIILTKSISRFARNTVDLLETVRDLRAINVEVRFEKENIHSLSGDGELMLSILASFAQEESRSISNNIKWSIQKRFKEGKHNGRFNIYGYRWVGQELIVEPSEAENIKLMYANYMNGLSAEFTAKQLTKMGVTAMKGGPFKATSVRQILKNITYTGNLLLQKEYTPDPITGKSRYNNGEMPQYFVENHHEAIIPMEEWQAVQDERLKRRKLGAHANKSINTTCFTSKIKCGNCGKNFRRSGKRQGKNKELYHIWTCRNKSEKGVKVCNARNIPEPALKKYATEVLGLEVFDEQIFIDSIEEIVASEGNMLQFKFYGGREVEVKWTSTARKDYWTPEVRRAWSERNKRKESRTWNGRTTEFTGFVVCGRCGANYRRQAVTSKTDGTVRRKWHCSNSAVACNEGKSRNCIYEEDLKVMVAEILGIPTFNEPTMDEKLSRISIIDTEVTFHFKDGHDEVRTFEIPKKKARTFSEEERARRRLVMKKRWEEKKRDEESNNDTSDNH

SEQ ID NO: 24 - protein, 464 aa, Artificial Sequence
  Synthetic
MDKKAAIYIRVSTQEQATEGYSIQAQTDRLTKYVEAKDFILYKKYIDAGYSASKLERPAMQELIQDVQSKKVDVVIVYKLDRLSRSQKDTMYLIEDIFRPNDVELISMQESFDTSTAFGSATVGMLSVFAQLERKSISERMITGRVERAKKGFYHTGGQDRPPAGYQFNSDNQLIINEYEAAAIKDLFRLYNDGLGKSSISEYLKKNYPGKNKWLPSSIDRMLKNSLYIGKVKFSGAEYDGIHEPIIDEVTFYKTQKEIARRKQTNTKRYNYVALLGGLCECGICGAKMANRRAVGRKGKVYRYYRCYSKKGSPKHMMKTDGCSSKAQQQFIIDEAVINNLKNIDVEAELKRRSAPQTNTSLISSQIESIDKQINKLIDLFQVDSMPLDVISEKIDKLNKEKQSMEKLLERKNKLDKTELQHRFDVLKSFDWDNSSIESKRVVIEMLVQKVIIHDNSIEIILVE

SEQ ID NO: 25 - protein, 475 aa, Artificial Sequence
  Synthetic
MTTGIYIRVSTEEQAKEGYSIANQKEKLIAFCESQGWSSYKIYSDEGYSAKDMKRPALQEMFNDMTQGVIKIILVYKLDRLTRSVRDLYTMLETFDKHDCKFKSATEVYDTTTAMGRLFITLVAALAQWERENTAERVRVVMENNVKNGKWKGGTLAYGYQLKNGNIVINEDEAATVSFIFNKIKFTGPLAIVRELIKKNIPTRTGSDWHVDTIRGIITNPFYIGYQRFNDSLKQYKGSVKQQKLYKSSHESIISEDEFWEVQEILNARKTHGSKKSTSTYYFSTVLTCGVCGASMCGHLSGNKKTYRCNKKKTSGNCDSSLILESTIVNWLLTNLESISKMLINNTITNTKGTITKEKHVNDFQKELKKITKLKEKHKTMYENDIIDIAELIEQTNKYRHREKEIKEIIHNIDKQDEKNEILKATLYNFNDAWAAATEPERKFLINSIFQNISIHAIGVHTRTKPRDIVISSIY

SEQ ID NO: 26 - protein, 457 aa, Artificial Sequence
  Synthetic
MDKIKRVALYIRVSTEEQVLHGDSIRTQTEALEQYSKDNNFIIVDKYIDEGYSATNLKRPNLKRMIEDVKNNKIDLVMITKIDRLSRGVKNYYKIMETLEKHKCDWKTILEDYDSSTAAGRLHINIMLSVAENEAAQTSERIKFVFQDKLKRGEVITGSVPFGYKIKDKHLVIKEDEASIVREAFDAYQDFSSLAKTIQHINTKFSTKYMFKWMPKMLKNKIYIGIYEKGDLVVENYCEPIISREQFNFVQTLLKKNIRFSENKFKMNYLFSGMIVCGSCGRKMGGVHSRGGANRHYLYYRCPLSFATKLCDNKPYLNEKKVEAFLLENVKKELQKTILEHESNNKKRQKKNNNKNLRNKLEKQIEKLQDLYFDDLINKDTYKFKYKKLNDDLSELNKAENEAESVEKDLKSMKIFLDTNFEDNYYDMNYSEKRTLWTSAIDRIEVQKNGELVIKFL

SEQ ID NO: 27 - protein, 430 aa, Artificial Sequence
  Synthetic
MSTDQEEQLSSYENQVNYYRDYISKHEDYELVDIYADEGISATNTKKRDAFNRLIQDCRAGKVDRILVKSISRFARNTLDCIKYVRELKELGVGVTFEKENIDSLDSKGEVLLTILSSLAQDESRSISENATWGIRKKFERGEVRVNTTKFMGYDKDENGRLIINPGQAETVKFIYEKFLEGYSPESIAKYLNDNEIPGWTGKANWYPSAIQKMLQNEKYKGDALLQKTFTVDFLTKKRVQNDGQVNQYYVENSHEAIIDKDTWELVQLELARRKDFREEHQLKAYIIQNDDNPFTTKVFCKACGSAFGRKNWTTSRGKRKVWQCNNRYRVKGQIGCQNNHIDEETLEKAVVMAVELLSENVDLLHGKWNKILEENRPLEKHYCTKLAEMINKPLWEFDSYEMCQVLDSITISEDGQISAKFLEGTEVDL

SEQ ID NO: 28 - protein, 528 aa, Artificial Sequence
  Synthetic
MKVPVWCYARISTLKQIDGFGIQRQINTINQFLQCVELDHRLPFTLDVDNVTQMVAEGKSAFRDKNWNEKTKLGQYRKLVMDGVISDSVLIVENIDRLTRLDPYMAIEIISGLVNRGTTILEIETGMTYSRYIPESITVLVMQCNRANGESKRKSIMMQKSHANRYGKVSKVRPRWFDVVEIDGIKQYRPNETAKAIQRMYNDYINGIGAAHIVRTYGNTDNGKAWTLVTVLRALSDKRVADDARYPPIIDKKLYDSVQALKAATNKKGNTHQKNMLNIFSGMSRCPVCNQSIIVKRNSHGNLFTVCLGKRTNKTCEARSISYFALERPLLTAIRDLDFSEVYKHEDKNVLTLRDQWIQNERDIAAFRERLSKASRYEKFVILDELETMNREQEELTIRLKSVDVPKDIQLTFDDDKLDLDTNYRIELNNRIKKLIQYINIVREDVTKSSYTIYCTIKYWTDVISHLVIIDVNIKRTGTGGTNTLTTTLRSVSSLNMDGTVSGNPDSDAWEYWKSFLDGTIGLVDYKK

SEQ ID NO: 29 - protein, 604 aa, Artificial Sequence
  Synthetic
MKKVFVYHRVSSDQQLDGSGIARQAELLEGYLERTGICAEMDDPAPVVLSDQGVSAFKGLNISEGELGAWMEQVRNGMWDSSILVVESIDRFSRQNPFDVMGYINALMAHNVAIHDVMANIVISRSNSKDLPFVMMNAQQAYDESKYKSDRIRKGWAKKREQAFNKGTIVTNKRPQWIEVENDKYVLNHKAAVVKEIFALYQTGMGCPTIAKQLQTKEGEQYKFNRPWTGELVHKILTNRRVTGKIFISEIIRNHDDIENPVTQKKYDMDVYPVVINEEEFELVQELLKSRRPNAGRVTVKKDGQEEVLIKSNLFSGIARCTECGGPMYHNVVRAKRTPKKGDPKIEEYRYIRCLNERDGLCENKAMTYETVERFVVEHLLGMDLNTVIKEQEFNPEIEVIRIQIDQVKDHITNYENGIERRKSAGKAVSFEMREELDDAKLELEQLLARQASLATVQVDLPVLQDVNVTELYNVNNVDIRTRYENELNKIVSNIRLKRNGNFYTIDIIYKQNELKRHVLFIENKKKEQKLISEVIIENVDGAKFYYTPSFVISVKDGEIRFQQTKEDLTIIDYSLLLNYVDAVDRCDAVGVWMRNNMSFLFTK

SEQ ID NO: 30 - protein, 478 aa, Artificial Sequence
  Synthetic
MKVALYVRVSTLEQAEEGYSINEQKDKLKKYCEIKDWTIVKEYVDPGRSGSNINRPSMQQLIKDADTGLYDAVLVYKLDRLSRSQKDTLYLIEDVFQKNNIHFISLSENFDTSTAFGKAMIGILSVFAQLEREQIKERMSMGRIGRAKSGKIMEFNNPAFGYEIDGDNYKVDPLRAEIVKRIYKMYLSGTSINKIKETLNSEGHIGNKKNWSDTRIRYILSNPTYLGKIRYDGKTYDGKFSPIIDEETFNKTQNELKERQTATYKRFNMKLRPFQSKYMLSGLLRCGYCGATLFVNSYVYNGKRKLRYNCPSTYKSKQKTRTYKIMDPNCPFKLVYAKDLEPAVINEIKNLALNPQSIQKPVKKTPDIDVEAIQKELAKVRKQQQRLIDLYVISDDVNIDNISKKSADLKLQEETLKKQLAPLEDPDDDDKIVAFNEILDQIKDIDSLDYDKQKFIVKKLIKKIDVWNDNKIKIHWNI

SEQ ID NO: 31 - protein, 479 aa, Artificial Sequence
  Synthetic
MNKVAIYVRVSTKGQAEEGYSIDEQIAMLTSYCSIHKWTVFDTYVDAGISGATIERPELSRLSRDAQKKKFNTMIVYDLKRLGRSQRNNIAFIEDVLEKNGIGFISLTENFDTSTPLGKAMVGILSAFGQLDRDTIRERMMMGKIGRAKSGKPMMTSTIAFGYTYDKSTSTLNINPVEAIIVKTIFNEYLSGMSLTKLRDYLNKNDLLRNGRPWNYQGVSRLLRNPVYMGMIRFSGKVYQGNHEPIIDAETFETTQKELKRRQIATYEFNKNTRPFRAKYMLSGIIRCACCGAPLHLVLRNKRKDGTRNMHYQCVNRFPRTTKGITVYNDGKKCNTEFYDKTNLEIYVLGQVRLLQLNKSKLDKMFETPVIINTEEIENQINSLNNKMRRLNDLYLNDMVTLADLKAQTHTFLKQKELLENELENNPAIRQEEDRKKFKKLLGTKDITQLSYEEQTFTVKNLIDKVFVKPSSIDIHWKI

SEQ ID NO: 32 - protein, 551 aa, Artificial Sequence
  Synthetic
MATKARVYSYLRFSDPKQAAGSSAARQLEYAKRWAAEHGMALDAALSMQDEGLSAYHQRHVTKGALGVFLAAIDEGRIPAGSVLIVEGLDRLSRAEPIQAQAQLAQIINAGITVVTASDGREYNRAGLKAQPMDLVYSLLVMIRAHEESDTKSKRVRAAIHRQCKGWKDGTWRGVIRNGKDPSWTRLDPETKAFQLVPERAEAVKLAIRMFRDGHGAVRIMRTLAEEGLQLTNGGNPAGQLYRILRNRALIGEKVLEIDGEEYRLAGYYPSLLSAEQFADLQQATEQRAKQKGTGEIPGLITGLRISYCGYCGSAMVAQNLMNRGRREDGGPQHGHRRLICVGNSQGMGCAVAGSCSVVPIEHAIMSYCADQMNLARLFEGGDRSEALAGKLAIARARVADTTAKVERITDAMLADDAGDAPAAFMRRARELEASLVEQQAEVDALEHELAAIASSPTPAVAKAWADVQEGVKALDYNARTKARQLVADTFERISIYHRGTEPEQTRSWKGTIDLVLVAKRGSARILHVDRQTGEWRGGEEVRDLPDDPIQ

SEQ ID NO: 33 - protein, 481 aa, Artificial Sequence
  Synthetic
MKYAVYVRVSTDRDEQVSSVENQIDICRYWLEKNGYEWDPNAVYFDDGISGTAWLERHAMQLILEKARRNELDTVVFKSIHRLARDLRDALEIKEILIGHGIRLVTIEENYDSLYEGGNDIKFEMFAMFAAQLPKTLSVSISAAMQAKARRGEVIGKPGLGYDVIDKRLVINEKEAEVVREIFDLSKKGFGYKKIASILNDKGIYTKSGQLWSDTTIAKVLKNQKYKGDLVLNRYKTVKVDGRKKRIYTPKDRLTIIEDHYPAIVSKELWNEVNNNRVSQKKVKQNMRNEFRGMIFCNHCGGSITVKYSGKCSKKNKKEWVYLKCSNFLRFNQCVNFNPIYYDEIREIIIYRLKQKEKELEIHFNPKIHEKREAKSIEIKKDIKLLKAKKEKLIDLYVEGLIDKDVFSKRDLNFENEIKEQELELLKLMDQNKRVNEEQQIKKAFSMLDEEKDMHEVFKILIKKITLSKDKYVEIEYTFSL

SEQ ID NO: 34 - protein, 605 aa, Artificial Sequence
  Synthetic
MDTYAGAYDRQSRERENSSAASPATQRSANEDKAADLQREVERDGGRFRFVGHFSEAPGTSAFGTAERPEFERILNECRAGRLNMIIVYDVSRFSRLKVMDAIPIVSELLALGVTIVSTQEGVFRQGNVMDLIHLIMRLDASHKESSLKSAKILDTKNLQRELGGYVGGKAPYGFELVSETKEITRNGRMVNVVINKLAHSTTPLTGPFEFEPDVIRWWWREIKTHKHLPFKPGSQAAIHPGSITGLCKRMDADAVPTRGETIGKKTASSAWDPATVMRILRDPRIAGFAAEVIYKKKPDGTPTTKIEGYRIQRDPITLRPVELDCGPIIEPAEWYELQAWLDGRGRGKGLSRGQAILSAMDKLYCECGAVMTSKRGEESIKDSYRCRRRKVVDPSAPGQHEGTCNVSMAALDKFVAERIFNKIRHAEGDEETLALLWEAARRFGKLTEAPEKSGERANLVAERADALNALEELYEDRAAGAYDGPVGRKHFRKQQAALTLRQQGAEERLAELEAAEAPKLPLDQWFPEDADADPTGPKSWWGRASVDDKRVFVGLFVDKIVVTKSTTGRGQGTPIEKRASITWAKPPTDDDEDDAQDGTEDVAA

SEQ ID NO: 35 - protein, 485 aa, Artificial Sequence
  Synthetic
MTKKVAIYTRVSTTNQAEEGFSIDEQIDRLTKYAEAMGWQVSDTYTDAGFSGAKLERPAMQRLINDIENKAFDTVLVYKLDRLSRSVRDTLYLVKDVFTKNKIDFISLNESIDTSSAMGSLFLTILSAINEFERENIKERMTMGKLGRAKSGKSMMWTKTAFGYYHNRKTGILEIVPLQATIVEQIFTDYLSGISLTKLRDKLNESGHIGKDIPWSYRTLRQTLDNPVYCGYIKFKDSLFEGMHKPIIPYETYLKVQKELEERQQQTYERNNNPRPFQAKYMLSGMARCGYCGAPLKIVLGHKRKDGSRTMKYHCANRFPRKTKGITVYNDNKKCDSGTYDLSNLENTVIDNLIGFQENNDSLLKIINGNNQPILDTSSFKKQISQIDKKIQKNSDLYLNDFITMDELKDRTDSLQAEKKLLKAKISENKFNDSTDVFELVKTQLGSIPINELSYDNKKKIVNNLVSKVDVTADNVDIIFKFQLA

SEQ ID NO: 36 - protein, 471 aa, Artificial Sequence
  Synthetic
MRKVAIYSRVSTINQAEEGYSIQGQIEALTKYCEAMEWKIYKNYSDAGFSGGKLERPAITELIEDGKNNKFDTILVYKLDRLSRNVKDTLYLVKDVFTANNIHFVSLKENIDTSSAMGNLFLTLLSAIAEFEREQIKERMQFGVMNRAKSGKTTAWKTPPYGYRYNKDEKTLSVNELEAANVRQMFDMIISGCSIMSITNYARDNFVGNTWTHVKVKRILENETYKGLVKYREQTFSGDHQAIIDEKTYNKAQIALAHRTDTKTNTRPFQGKYMLSHIAKCGYCGAPLKVCTGRAKNDGTRRQTYVCVNKTESLARRSVNNYNNQKICNTGRYEKKHIEKYVIDVLYKLQHDKEYLKKIKKDDNIIDITPLKKEIEIIDKKINRLNDLYINDLIDLPKLKKDIEELNHLKDDYNKAIKLNYLDKKNEDSLGMLMDNLDIRKSSYDVQSRIVKQLIDRVEVTMDNIDIIFKF

SEQ ID NO: 37 - protein, 471 aa, Artificial Sequence; identical to SEQ ID NO: 36
  Synthetic

SEQ ID NO: 38 - protein, 508 aa, Artificial Sequence
  Synthetic
MKKAIAYMRFSSPGQMSGDSLNRQRRLIAEWLKVNSDYYLDTITYEDLGLSAFKGKHAQSGAFSEFLDAIEHGYILPGTTLLVESLDRLSREKVGEAIERLKLILNHGIDVITLCDNTVYNIDSLNEPYSLIKAILIAQRANEESEIKSSRVKLSWKKKRQDALESGTIMTASCPRWLSLDDKRTAFVPDPDRVKTIELIFKLRMERRSLNAIAKYLNDHAVKNFSGKESAWGPSVIEKLLANKALIGICVPSYRARGKGISEIAGYYPRVISDDLFYAVQEIRLAPFGISNSSKNPMLINLLRTVMKCEACGNTMIVHAVSGSLHGYYVCPMRRLHRCDRPSIKRDLVDYNIINELLFNCSKIQPVENKKDANETLELKIIELQMKINNLIVALSVAPEVTAIAEKIRLLDKELRRASVSLKTLKSKGVNSFSDFYAIDLTSKNGRELCRTLAYKTFEKIIINTDNKTCDIYFMNGIVFKHYPLMKVISAQQAISALKYMVDGEIYF

SEQ ID NO: 39 - protein, 452 aa, Artificial Sequence
  Synthetic
MKAAIYIRVSTQEQVENYSIQAQTEKLTALCRSKDWDVYDIFIDGGYSGSNMNRPALNEMLSKLHEIDAVVVYRLDRLSRSQRDTITLIEEYFLKNNVEFVSLSETLDTSSPFGRAMIGILSVFAQLERETIRDRMVMGKIKRIEAGLPLTTAKGRTFGYDVIDTKLYINEEEAKQLQLIYDIFEEEQSITFLQKRLKKLGFKVRTYNRYNNWLTNDLYCGYVSYKDKVHVKGIHEPIISEEQFYRVQEIFTRMGKNPNMNRDSASLLNNLVVCSKCGLGFVHRRKDTMSRGKKYHYRYYSCKTYKHTHELEKCGNKIWRADKLEELIINRVNNYSFASRNVDKEDELDSLNEKLKIEHAKKKRLFDLYINGSYEVSELDSMMNDIDAQINYYESQIEANEELKKNKKIQENLADLATVDFDSLEFREKQLYLKSLINKIYIDGEQVTIEWL

SEQ ID NO: 40 - protein, 471 aa, Artificial Sequence
  Synthetic
MTVGIYIRVSTEEQVKEGFSISAQKEKLKAYCTAQGWEDFKFYVDEGKSAKDMHRPLLQEMISHIKKGLIDTVLVYKLDRLTRSVVDLHNLLSIFDEFNCAFKSATEVYDTSSAMGRFFITIISSVAQFERENTSERVSFGMAEKVRQGEYIPLAPFGYTKGTDGKLIVNKIEKEIFLQVVEMVSTGYSLRQTCEYLTNIGLKTRRSNDVWKVSTLIWMLKNPAVYGAIKWNNEIYENTHEPLIDKATFNKVAKILSIRSKSTTSRRGHVHHIFKNRLICPACGKRLSGLRTKYINKNKETFYNNNYRCATCKEHRRPAVQISEQKIEKAFIDYISNYTLNKANISSKKLDNNLRKQEMIQKEIISLQRKREKFQKAWAADLMNDDEFSKLMIDTKMEIDAAEDRKKEYDVSLFVSPEDIAKRNNILRELKINWTSLSPTEKTDFISMFIEGIEYVKDDENKAVITKISFL

SEQ ID NO: 41 - protein, 594 aa, Artificial Sequence
  Synthetic
MSPFIAPDVPEHLLDTVRVFLYARQSKGRSDGSDVSTEAQLAAGRALVASRNAQGGARWVVAGEFVDVGRSGWDPNVTRADFERMMGEVRAGEGDVVVVNELSRLTRKGAHDALEIDNELKKHGVRFMSVLEPFLDTSTPIGVAIFALIAALAKQDSDLKAERLKGAKDEIAALGGVHSSSAPFGMRAVRKKVDNLVISVLEPDEDNPDHVELVERMAKMSFEGVSDNAIATTFEKEKIPSPGMAERRATEKRLASVKARRLNGAEKPIMWRAQTVRWILNHPAIGGFAFERVKHGKAHINVIRRDPGGKPLTPHTGILSGSKWLELQEKRSGKNLSDRKPGAEVEPTLLSGWRFLGCRICGGSMGQSQGGRKRNGDLAEGNYMCANPKGHGGLSVKRSELDEFVASKVWARLRTADMEDEHDQAWIAAAAERFALQHDLAGVADERREQQAHLDNVRRSIKDLQADRKPGLYVGREELETWRSTVLQYRSYEAECTTRLAELDEKMNGSTRVPSEWFSGEDPTAEGGIWASWDVYERREFLSFFLDSVMVDRGRHPETKKYIPLKDRVTLKWAELLKEEDEASEATERELAAL

SEQ ID NO: 42 - protein, 522 aa, Artificial Sequence
  Synthetic
MAQPLRALVGARVSVVQGPQKVSHIAQQETGAKWVAEQGHTVVGSFKDLDVSATVSPFERPDLGPWLSPELEGEWDILVFSKIDRMFRSTRDCVKFAEWAEAHGKILVFAEDNMTLNYRDKDRSGSLESMMSELFIYIGSFFAQLELNRFKSRARDSHRVLRGMDRWASGVPPLGFRIVDHPSGKGKGLDTDPEGKAILEDMAAKLLDGWSFIRIAQDLNQRKVLTNMDKAKIAKGKPPHPNPWTVNTVIESLTSPRTQGIKMTKHGTRGGSKIGTTVLDAEGNPIRLAPPTFDPATWKQIQEAAARRQGNRRSKTYTANPMLGVGHCGACGASLAQQFTHRKLADGTEVTYRTYRCGRTPLNCNGISMRGDEADGLLEQLFLEQYGSQPVTEKVFVPGEDHSEELEQVRATIDRLRRESDAGLIATAEDERIYFERMKSLIDRRTRLEAQPRRASGWVTQETDKTNADEWTKASTPDERRRLLMKQGIRFELVRGKPDPEVRLFTPGEIPEGEPLPEPSPR

SEQ ID NO: 43 - protein, 490 aa, Artificial Sequence
  Synthetic
MYELKYAVYVRVSTDRDEQVSSIENQIDICRYWIEKNGYEWDENSIYKDEAVSGTAWLERHAMQLILEKVRRKELDTVVFKSIHRLGRDLRDALEIKEILLGHGVRLVTIEEGYDSYYEGKNDLKFEMYAMFASQLPKTVSVSVSAALAAKVRRGEYTGGIVPYGYKIVDQKYTINEEEAELVRKMYELYDNGLGYMKIADAINDMGVPSRTGKLWAYPSIRAIITNAAYKGDYIMQKYAEVKVDGRKKMIINPKEKWVVFENHHPAIITRDLWDRVNNSKTDKKTKRRVAIKNELRGLACCAHCRTPLALQQRMYKNKEGETRYYCYLICGRYKRMGARGCVKHSGLQYSDLRLFVLQKLKEKENDLEKVFNLNDTDKHQEKQKKLRKEKKELEIKRERLLDLYLDGGPIDKETFTKRDKNFEKIIKEKELEILKLDDVKTLVVEQQKVKEAFELLEKSEDLYSTFKKLITRIEVSQDGVINIVYRFEE

SEQ ID NO: 44 - protein, 500 aa, Artificial Sequence
  Synthetic
MLGRLRLSRSTEESTSIERQREIVTAWADSNGHTVVGWAEDVDVSGAIDPFDTPSLGVWLDERRGEWDILCAWKLDRLGRDAIRLNKLFLWCQEHGKTVTSCSEGIDLGTPVGRLIANVIAFLAEGEREAIRERVASSKQKLREIGRWGGGKPPFGYMGVRNPDGQGHILVVDPVAKPVVRRIVEDILEGKPLTRLCTELTEERYLTPAEYYATLKAGAPRQQAEEGEVTAKWRPTAVRNLLRSKALRGHAHHKGQTVRDDQGRAIQLAEPLVDADEWELLQETLDGIAADFSGRRVEGASPLSGVAVCMTCDKPLHHDRYLVKRPYGDYPYRYYRCRDRHGKNVPAETLEELVEDAFLQRVGDFPVRERVWVQGDTNWADLKEAVAAYDELVQAAGRAKSATARERLQRQLDILDERIAELESAPNTEAHWEYQPTGGTYRDAWENSDADERRELLRRSGIVVAVHIDGVEGRRSKHNPGALHFDIRVPHELTQRLIAP

SEQ ID NO: 45 - protein, 487 aa, Artificial Sequence
  Synthetic
MAYAVYVRVSSDKDEQVSSVENQIDICRYWLENNGFEWDENAVYFDDGISGTAWLERHAIQLVLEKARKKEIDTVVFKSIHRLARDLKDALEIKEILLGHGVRLITIEEGYDSHYEGKNDMKFEMYAMFASQLPKTLSVSITAALAAKVRRGGYTGGFVPYGYEIIDGKYAINEEEAALVKEIFELYAQGFGYIKIANTINDKGARTRKGAPWTFSTLSKMIKNPAYKGTYIMQKYGTVKVNGRKKKVINPKEKWVIFEDHHPAIISHELWEKVNNKDPNKFKKKRRVSTTNELRGITVCAHCGTAMSKRNSINVSKNGTETEYSYMICNWSRITARRECVRHVPIHYKDLRALVLSKLKEKEKELDKEFGSDENQLQVKLRKLKKDINDLKFKRERLLDLYLEDERIDKDTFTIRNAKIEKEIGLKEMEIRKASNIEIQMKEKQEVRDAFALLEESKDLHSVFQKLIKRIEVAQDGAIDIYYRFEE

SEQ ID NO: 46 - protein, 453 aa, Artificial Sequence
  Synthetic
MDRDGDGLAVERQREDCLKICTDRGWEPTQYIDNDTSASRGRRPSYERMLSDIRSGHIDAVVAWDLDRLHRQPKELEQFIELADEKRLSLATVGGDADLSTDNGRLFARIKGAVAKAEVERKSARQKRAFLQMAQSGKGWGPRAFGYNGDHEKAKIVPKEADALRSGYKMLMSGETLYSIAKSWNDAGLKTPRGNLFTGTTVRRILQNPRYTATRTYRNETVGDGDWPAIVDETTWEAAHSILSDPSRHQPRQVRRYLLGGLLTCSECGNKMAVGVQHRKNGNVPIYRCKHVSCGRVTRRVERMDEWVKELVLRRMSSRHWVPGNQDNRELALELREELDAIKHRMDSLAVDFAEGELTSSQLRIANERLQVKLDEVESKLRRTNVKPLPDGILTANDRGRFYDEMSLDARRALIEALCDSIVVHPIGLKGMQATHAPLGHNIDVHWHKPSNG

SEQ ID NO: 47 - protein, 484 aa, Artificial Sequence
  Synthetic
MNKVAIYVRVSTTMQAEEGYSIDEQIDKLTSYCKIKDWTVYDIYKDGGFSGGNIERPAMERLISDANRKRFDTVLVYKLDRLSRSQKDTLYLIEEIFGKNDISFLSLNESFDTSTPFGKAMIGILSVFAQLEREQIKERMLLGKIGRAKSGKSMMVSKVSFGYTYDKLKGELIVNQAEALVVRKIFDEYLGGRSLIKLRDYLNSNGIYRGDKYWNYRGLLLILSNPVYIGMIRYRGEIYPGNHQPIIDTEVFNKTQEEIKKRQIEALEFSNNPRPFRAKYMLSGLAKCGYCGTPLKIILGYKRKDGSRSMRYQCINRFPRNTKGITIYNDNKKCDSGFYEKADIEEFVIAQIRGLQLNSYKLDNMFDKQPIIDVEGIEKQITSLDNKLKRLNDLYLNDMIELDDLKKQTQSLRKQKTMLEDELINNPAIMQDKNKNHFKEILGTKDITTLDYETQKSIVNNLVNKVFVKAGHIKIEWKIPFKKV

SEQ ID NO: 48 - protein, 481 aa, Artificial Sequence
  Synthetic
MNTINKVAIYVRVSTSVQAEEGYSIDEQIDKLKSYCQIKDWTVYDVYKDGGFSGGNINRPALEKMIIDAKKKRFDTVLVYKLDRLSRSQKDTLYLIEDVFSKNDISFLSLQENFDTSTPFGKAMVGLLSVFAQLEREQIKERMQLGMIGRAKSGKPMMFTNVSFGYTYSPKTQQLTINQAEAVIVKQIFNEFLGGMSPLRLMAYLNENNILRNGKEWNYQGIQRILRNPVYIGKIKYNNVIYPGLHEPIIDEESYYKAQKLLDARQDEMRVKGKNRQFKAKYMLSGTAKCGYCGAPLRIKIGNKRLDGTRLKVYQCCNRYPRKYAVVTYNDNKKCNSGNYQKEDLEQYVIAEIRKLQLKPEKIDKLFNKVSKIDTVQINKQIASIDKKINRLNDLYLNDMIDIDKLKADAEKFKEQKRVLEKELDKDLKIQEQEKNKEDFKKTIGFKDVTKLDYEEQSFIVKSLIDKILVKKGLIKILWKI

SEQ ID NO: 49 - protein, 461 aa, Artificial Sequence
  Synthetic
MNVAIYCRVSTLEQKEHGYSIEEQERKLKQFCEINDWNVADVFVDAGFSGAKRDRPELQRMMNDIKRFDLVLVYKLDRLTRNVRDLLDLLEIFEQNNVAFRSATEVYDTSTAMGRLFVTLVGAMAEWERETIRERTQMGKLAALKKGIMLTTPPFYYDRVDNKFVPNKYKEVVLFAYEEALKGKSAKSIARKLNNSDIPPPNNRKWEDRSITRALRSPFTRGHFEWGGVYLENNHEPIITEEMYEKVKDRLEERTNTKKIKHVSIFRSKLVCPTCDSKLTMNTHKVTLKDRVYYNKHYYCNNCKETPNLKPVYVRSEEVERVFYEYLQHQDLTQYDIVEDKEEKEIVIDINKIMQQRKRYHKLYANGLMNEDELAELIEETDIAIEEYKKQSENEEVKQYDTEDIKQYKNLLLEMWEVSSDEEKAEFIQIAIKNIFIEYVLGKNDNKKKRRSLKIKDIEFY

SEQ ID NO: 50 - protein, 463 aa, Artificial Sequence
  Synthetic
MTVGIYIRVSTEEQARDGFSISAQREKLKAYCIAQDWDSFKFYVDEGVSAKDTNRPQLNMMLDHIKQGLISIVLVYRLDRLTRSVMDLYKLLDTFDEYNCAFKSATEVYDTSTAMGRMFITIVAALAQWERENLGERVRMGQLEKARQGEYSAKAPFGFDKNKHSKLVVNDIESKVVLDMVKKIEEGYSIRQLANHLDGYAKPIRGYKWHIRTILDILSNHAMYGAIRWSNEIIENAHQGIISKDRFLKVQKLLSSRQNFKKRKTTSIFMFQMKLICPNCGNHLTCERVTYHRKKDNKDIEHNRYRCQACVLNKKKAFSSSEKKIEKAFLDYIDEYRFTKIPELKKEADETKILKKKLSKIERQREKFQKAWSNDLMTDEEFADRMKETKNTLGEIKEELNKLGLNQDKKIDNDTVKRIVNDIKNKWSLLSPLEKKQFMSLFIKNIQLKKINEKNIVVNITFY

SEQ ID NO: 51 - protein, 516 aa, Artificial Sequence
  Synthetic
MYRPDSLDVCIYLRKSRKDVEEERRALEEGSSYNALERHRKRLFAIAKAENHNIIDIFEEVASGESIQERPQMQQLLRKLEGNEIDGVLVIDLDRLGRGDMLDAGMIDRAFRYSSTKIITPTDVYDPDDESWELVFGIKSLISRQELKSITRRLQNGRIDSVKEGKHIGKKPPYGYLKDENLRLYPDPEKAWIVKKIFELMCDGKGRQMIAAELDRLGIDPPVTKRGAWDSSTITSIIKNEVYTGVIVWGKFKHKKRNGKYTRHKNPQEKWIMYENAHEPIISKELFDAANEAHSSRHKPAVITSKELTNPLAGILKCKLCGYTMLIQTRKDRPHNYLRCNNPACKGKQKQSVFNLVEEKLLYSLQQIVDEYQAQKVEEVEIDDSKLISFKEKAIISKEKELKELQTQKGNLHDLLEQGIYTVEIFLERQKNLVERITSIENDVEVLQKEIEIEQVKEHNKTEFIPALKTVIESYHKTTNVELKNQLLKTILSTVTYYRHPDWKANEFEIQVYFKI

SEQ ID NO: 52 - protein, 481 aa, Artificial Sequence
  Synthetic
MITTNKVAIYVRVSTTNQAEEGYSIEEQKDKLKSYCNIKDWNVFNVYTDGGFSGSNTERPALEQLIKDAKKKKFDTVLVYKLDRLSRSQKDTLYLIEDIFLENNIDFVSLLENFDTSTPFGKAMVGILSVFAQLEREQIKERMQLGKLGRAKAGKSMMWAKVAYGYTYHKGSGEMTINELEAIVVREIFNSYLEGMSITKLRDKINDTYPKTPAWSYRIIRQILDNPVYCGYNQYKGEVYKGNHEPIISEEDFNKTQDELKIRQRTAAEKFNPRPFQAKYMLSGIAQCGYCKAPLKIIMGAVRKDGTRFIKYECYQRHPRTTRGVTTYNNNQKCHSSSYYKQDVEDYVLREISKLQNDKKAIDELFENTNMDTIDRESIKKQIEAISSKIKRLNDLYIDDRITIDELRKKSTEFTLSKTFLEEKLENDPILKQQESKDNIKKILSCDDILTMDYDQQKIIVKGLINKVQVTADKVIIKWKI

SEQ ID NO: 53 - protein, 481 aa, Artificial Sequence
  Synthetic
MITTNKVAIYVRVSTTNQVEEGYSIDEQKDKLSSYCDIKDWNVYKVYTDGGFSGSNTDRPALESLIKDAKKRKFDTVLVYKLDRLSRSQKDTLHLIEDVFIKNGIEFLSLQENFDTSTPFGKAMIGLLSVFAQLEREQIKERMQLGKLGRAKSGKSMMWAKTSYGYDYHKETGTVTINPAQALTIKFIFESYLRGRSITKLRDDLNEKYPKHVPWSYRAVRTILDNPVYCGFNQYKGEIYPGNHEPIISKEEYDKTQSELKIRQRTAAENVNPRPFQAKYILSGIAQCGYCGAPLKIMLGVKRKDGSRLKKYECHQRHPRTLRGVTTYNDNKKCDSGFYYKDKLEAYVLKEISKLQDDADYLDKIFSGDNAETIDRESYKKQIEELSKKLSRLNDLYIDDRITLEELQSKSAEFISMRGTLETELENDPALRKNKRKADMRKLLNAEKVFSMDYESQKVLVRRLINKVKVTAEDIVINWKI

SEQ ID NO: 54 - protein, 467 aa, Artificial Sequence
  Synthetic
MKCVIYRRVSTDMQVEEGISLDMQKLRLEQYAKSQDWIVVNDYCDEGYSAKNTERPAFQQMIRDMKKKQFDIILVYRLDRFTRSVSDLHSILKIMDEYNVKFKSSTEIFDTTTATGRMFITLVATLAQWERETTAERVRDSMHKKAELGLRNGAKAPMGYNLKKGNLYINHTEAEIVKYIFEMYKTKGVVSIVKSLNSRGVKTKQGKIFNYDAVRYIINNPIYIGKIRWGEDILTDIAQEDFETFINKDTWYTVQQIQDSRKVGKVRLQNFFVFSNVLKCARCGKHFLGNRQVRSHNRIAVGYRCSSRHHQGICDMPQVPENILEKEFLNLLEDAVVELDASDEKPVELSNLQEQYNRIQDKKARLKFLFIEGDIPKKEYKKDMLTLNQEENIIQKQLANITDTVSSIEIKELLNQLKDEWNNLNNESKKAAVNAIISSITVDIIKPARAGKNPIPPVIKVMDFKLK

SEQ ID NO: 55 - protein, 508 aa, Artificial Sequence
  Synthetic
MKKAIAYMRFSSPGQMSGDSLNRQRRLIAEWLKVNSDYYLDTITYEDLGLSAFKGKHAQSGAFSEFLDAIEHGYILPGTTLLVESLDRLSREKVGEAIERLKLILNHGIDVITLCDNTVYNIDSLNDPYSLIKAILIAQRANEESEIKSSRVKLSWKKKRQDALESGTIMTASCPRWLSLDDKRTAFVPDPDRVKTIELIFKLRMERRSLNAIAKYLNDHAVKNFSGKESAWGPSVIEKLLANKALIGICVPSYRARGKGISEIAGYYPRVISDDLFYAVQEIRLAPFGISNSSKNPMLINLLRTVMKCEACGNTMIVHAVSGSLHGYYVCPMRRLHRCDRPSIKRDLVDYNIINELLFNCSKIQPVENKKDANETLELKIIELQMKINNLIAALSVAPEVTAIAEKIRVLDKELRRASVSLKTLKSKAVSSLGDFHAIDLTSKNGRELCRTLAYKTFEKIIINTDNKTCDIYFMNGIVFKHYPLMKTISAQQAISTLKYMVDGEVYF

SEQ ID NO: 56 - protein, 508 aa, Artificial Sequence
  Synthetic
MKKAIAYMRFSSPGQMSGDSLNRQRRLITEWLKVNSDYYLDTVTYEDLGLSAFNGKHAQSGAFSEFLDAIEHGYILPGTTLLVESLDRLSREKVGEAIERLKLILNHGIDVITLCDNTVYNIDSLNEPYSLIKAILIAQRANEESEIKSSRVKLSWKKKRQDALESGTIMTASCPRWLSLDDKRTAFVPDPDRVKTIELIFKLRMERRSLNAIAKYLNDHAVKNFSGKESAWGPSVIEKLLANKALIGICVPSYRARGKGISEIAGYYPRVISDDLFYAVQEIRLAPFGISNSSKNPMLINLLRTVMKCEACGNTMIVHAVSGSLHGYYVCPMRRLHRCDRPSIKRDLVDYNIINELLFNCSKIQPVENKKDANETLELKIIELQMKINNLIAALSVAPEVTAIAEKIRVLDKELRRASVSLKTLKSKAVSSLGDFHAIDLTSKNGRELCRTLAYKTFEKIIINTDNKTCDIYFMNGIVFKHYPLMKTISAQQAISTLKYMVDGEVYF

SEQ ID NO: 57 - protein, 515 aa, Artificial Sequence
  Synthetic
MKTAIYLRKSRADLEAEARGEGETLAKHRTTLLKIAKEMNLNVLAVREEIVSGESLVKRPEMLALLEEIEDNKYDVVLCMDMDRLGRGGMKEQGIILETFKRSNTKIMTPRKTYDLNDEWDEEYSEFEAFMARKELKIITRRMQRGRIASVEAGNYLGTHAPYGYDIHRLNKRERTLTINSEEASVVRMIFDWYANEDMGANAIRSKLNDLGYKSKLGNEWNPYSILDILKNNVYIGKVTWQKRKEVKRPDAVKRSCARQDKSDWIIADGKHEPIIPESLFEQVQEKLNSRYHVPYNTNGIKNPLAGIIKCSKCGYSMVQRYPKNRKETMDCKHRGCENKSSYTELIEKRLLEALKEWYINYKADFEKHKQDDKLKETQVIQMNEAALRKLEKELVDVQKQKNNLHDLLERGVYTVDMFLERSNVVSDRITEITSTMENLKKEIKTEIKKEKVKKDTIPQVEHVLDLYFKTDDPKKKNSLLKSVLEKAVYKKEKWQRLDDFELVLYPKLPQDGDI

SEQ ID NO: 58 - protein, 515 aa, Artificial Sequence
  Synthetic
MKTAIYLRKSRADLEAEARGEGETLAKHRTTLLKIAKEMNLNVLSVREEIVSGESLVKRPEMLALLEEIEDNKYDVVLCMDMDRLGRGGMKEQGIILETFKRSNTKIMTPRKTYDLNDEWDEEYSEFEAFMARKELKIITRRMQRGRVASVEAGNYLGTHAPFGYDIHRLNKRERTLTINPEEASVVRMIFDWYANEDMGANAIRSKLNDLGYKSKLGNEWNPYSILDILKNNVYIGKVTWQKRKEVKRPDAVKRSCTRQDKSDWIIADGKHEPIIPESLFEQVQEKLNSRYHIPYNTNGIKNPLAGIIKCSKCGYSMVQRYPKNRKETMDCKHRGCENKSSYTELIEKRLLEALKEWYINYKADFEKHKQDDKLKETQVIQMNEAALRKLEKELVDVQKQKNNLHDLLERGVYTVDMFLERSNVVSDRITEITSTMENLKKEIKTEIKKEKVKKDTIPQVEHVLDLYFKTDDPKKKNSLLKSVLEKAVYKKEKWQRLDDFELVLYPKLPQDGDI

SEQ ID NO: 59 - protein, 463 aa, Artificial Sequence
  Synthetic
MKVAIYTRVSSAEQANEGYSIHEQKRKLISFCEVNDWNRYEVFSDPGVSGGSMKRPSLQKLFDRLEEFDLVLVYKLDRLTRNVRDLLEMLEVFEKNNIAFKSATEVFDTNSAIGKLFITMVGAMAEWERETIRERSLMGSHAAIRSGKYIRARPFCYDLIDDKLKPNQHAKYIRFMVDKLMIGKSASEVVRQLESKKKPPGITKWNRKMILNKSPNPVMRGHTKFGDLLIENTHEPIISEDEYLKLIDIIEKRTYKTKSKHKAIFRGVLECPRCQSKLHLSRSIKKYDNGKTREVRRYSCDKCHRDNTVKNISFNESEIERQFINTLLKKGTDNFKISVPKKKSYDIEDNKVKINEQRANYTRSWSLGYIKDEEYFMLMDETENLLKDIEEKAKSHTDEKLNEEQIRTVKNLLIKGFKIATLEDKEDLITSSVDVIKFEFIPKEFNKNKTLNTVKINEIQFKF

SEQ ID NO: 60 - protein, 487 aa, Artificial Sequence
  Synthetic
MKYAVYVRVSTDKDEQVSSIQNQIEICRYWIEKNGFEWDENSIYKDEAVSGTAWLERRAMQLILGKARKKELDTVVFKSIHRLGRDLRDALEIKEILLGHGVRLVTIEEGYDSYYEGENDLKFEMYAMFASQLPKTLSVSISAALAAKVRRGEYTGGTVPYGYKIVDKKYVINQEEAEIVREMYELYDNGLGYLRISNALNDVGKYKRSGKLWTYSAVKLIITNPMYKGDYVMGRSTEVKVDGRKKRIQEPREKWVVFENHHPAIIERSLWDKINNPKINKKIKRRVAVTNELRGIARCIHCGSPFVLHTYKYKNKEGEELNYGYLTCGTYKLTGGRGCVKHSGLRYERLRSLVLRKLKEKERDLEKVFKLNDKDKHQEKQKKLRKEKKELEIKRERLLDLYLDGGSIDKATFTKRDANFAKNIKEKELEILKLDDVKALIVEQQKVKDAFKLLEDSENLYPVFKKLIARIDISQNGAVDIRYRFEE

SEQ ID NO: 61 - protein, 487 aa, Artificial Sequence
  Synthetic
MKYAVYVRVSTDKDEQVSSIQNQIEICRYWIEKNGFEWDENSIYKDEAVSGTAWLERRAMQLILGKARKKELDTVVFKSIHRLGRDLRDALEIKEILLGHGVRLVTIEEGYDSYYEGKNDLKFEMYAMFASQLPKTLSVSISAALAAKVRRGEYTGGTVPYGYKIVDKKYVINQEEAEIVREMYELYDNGLGYLRISNALNDVGKYKRSGKLWTYSAVKLIITNPMYKGDYVMGRSTEVKVDGRKKRIQEPREKWVVFENHHPAIIERPLWDKINNPKINKKIKRRVAVTNELRGIARCIHCGSPFVLHTYKYKNKEGEELNYGYLTCGTYKLTGGRGCVKHSRLRYERLRSLVLRKLKEKERDLEKVFKLNDKDKHQEKQKKLRKEKKELEIKRERLLDLYLDGGSIDKETFTKRDANFAKNIKEKELEILKLDDVKALIVEQQKVKDAFKLLEDSENLYPVFKKLIARIDISQNGAVDIRYRFEE

SEQ ID NO: 62 - protein, 481 aa, Artificial Sequence
  Synthetic
MMTTNKVAIYVRVSTTNQAEEGYSIDEQKDKLSSYCHIKDWSIYNIYTDGGFSGSNTERPALEQLVKDAKNKKFDTVLVYKLDRLSRSQKDTLYLIEDIFLENKIDFVSLLENFDTSTPFGKAMVGILSVFAQLEREQIKERMQLGKLGRAKSGKSMMWAKTSYGYDYHKETGEMTINELEAIVIREIFQSYLGGRSITKLRDDINQRYPKTPAWSYRIIRQILDNPVYCGYNQYKGKIYKGNHEPIISEEVYNKTQEELKIRQRTAAEKFNPRPFQAKYMLSGIAQCGYCQAPLTIIMGMVRKDGTRFIKYECKQRHPRKTTGVTVYNNNEKCHSGAYQKEEVEEYVLKEISKLQNDTSYLDEIFSTPETESIDRDSYQKQIDELTKKLSRLNDLYIDDRITLEELQKKSAEFTTIRAFLEAELENDPSLKQQEKKEDMRKILGAEDIFLMDYEGQKTMVKGLINKVQVTAEDISIKWKI

SEQ ID NO: 63 - protein, 484 aa, Artificial Sequence
  Synthetic
MNKVAIYVRVSTTMQAEEGYSIDEQIDKLKSYCKIKDWTVYDIYKDGGFSGGNIERPAMERLISDAKRKKFDTVLVYKLDRLSRSQKDTLFLIEEVFDKNDISFLSLNESFDTSTAFGKAMIGILSVFAQLEREQIKERMLLGKIGRAKTGKSMMFSKVSFGYTYDKLKDELVVNQAESIIVRKIFDAYLGGLSLNKLRDYLNNNGIYRGDKPWNYQGLRRILSNPVYIGMIRYREEIYPGNHKAIIDIDDYNKTQEEIKKRQIKALEFSNNPRPFRSKYMLSGIAKCGYCGTPLQIILGSKRKDGTRNMRYQCINRFPRNTKGVTIYNDGKKCESGFYEKADIEEFVINEIRSLQINYNKLDAMFDRHPTVNSDDIKKQIITLDNKLKRLNDLYINNMIELDDLKKQTQSLRKQKTILEDELLNNPAITQEKNKKHFKEMLATKDITKLDYETQKNIVNNLINKVFVKSGYIKIEWKIPFKKA

SEQ ID NO: 64 - protein, 285 aa, Artificial Sequence
  Synthetic
MRKVYSYIRFSSTKQAFGDSHRRQSKAIQDWLASHPDHILDESLSFEDLGRSAFHGDHLKEGGALRAFLEAVKQGLIPPDSVLLVESLDRVSRQSISHAQETIRAILEQGITVVTLSDGETYNRQSLDDSLALIRMIILQERSHNESVIKSDRIKKVWSHKRQQFEQDGTKITGNCPGWLKLNSDGKSFSLIPHHVETIHRIFDEKLSGKSLHAIARDLNLENIPTITNKKVDTGWTPTRVRDLLLKESLIGVAYGVSDYFPPAISKEKFHAVQMISKRPISDVL

SEQ ID NO: 65 - protein, 515 aa, Artificial Sequence
  Synthetic
MKTAIYLRKSRADLEAEARGEGETLAKHRSTLLKIAKEMNLNVLAVREEIVSGESLVKRPEMLALLEEIEDNKYDAVLCMDMDRLGRGGMKEQGIILETFKRSNTKIMTPRKTYDLNDEWDEEYSEFEAFMARKELKIITRRMQRGRIASVEAGNYLGTHAPFGYDIHRLNKRERTLTLNSEEASVVRMIFDWYANEDMGANAIRSKLNDLGYKSKLGNEWNPYSILDILKNNVYIGKVTWQKRKEVKHPDTVKRSCARQDKSDWIIADGKHEPIIPESLFEQVQEKLNSRYHIPYNTNGIKNPLAGIIKCAKCGYSMVQRYPKNRKETMDCKHRGCENKSSYTELIEKRLLEALKEWYINYKADFEKHKQDDKLKETQVIQMNEAALRKLEKELVDVQKQKNNLHDLLERGVYTVDMFLERSNVVSVRITEITSTMENLKKEIKTEIKKEKVKKDTIPQVEHVLDLYFKTDDPKKKNSLLKSVLEKAVYKKEKWQRLDDFELVLYPKLPQDGDI

SEQ ID NO: 66 - protein, 588 aa, Artificial Sequence
  Synthetic
MRIVNKIEAKTPQIPHRKRVAAYARVSMESERLQHSLSAQVSFYSSLIQSNPAWEYVGVYADNGITGTKAEAREEFNRMIADCEAGKIDIVLTKSISRFARNTVDLLNTVRRLKELGVSVQFEKERIDSLTEDGELMLTLLASFAQEEIRSLSDNVKWGTRKRFEKGIPNGRFQIYGYRWEGDHLVIHEEEAKIVRLIYDNYMNGLSAETTEKQLAEMGVKSYKGQHFGNTSIRQILGNITYTGNLLFQKEYVADPISKKSRINRGELPQYFVENTHEAIIPMEVYQAVQAEKARRRELGALANWSINTSCFTSKIKCGRCGKSYQRSNRKGRKDPNANYTIWVCGTRRKTGNAYCQNKDIPEQMLKDACAEVMGLDTFDEIIFSEQIDHIEIPAPNEMIFYFKDGRIVPHHWESTMRKDCWTDERRAAKGRYVQEHQLGPNTSCFTSRIRCDSCGENYRRQRSRHKDGSFDSVWRCASGGKCQSPSIKEDALKNLCADAMGLEEFSETVFREQIVCIHITAPYQLSIRFFDGHTFETAWENKRKMPRHTEERKQHMREVMIQRWREKRGESNDNTCDDKPIHGNADQ

SEQ ID NO: 67 - protein, 470 aa, Artificial Sequence
  Synthetic
MKGESELDKKAAIYIRVSTQEQATEGYSIQAQTDRLTKYVEAKDFILYKKYIDAGYSASKLERPAMQELIQDVKSKKVDVVIVYKLDRLSRSQKDTMYLIEDIFRPNDVELISMQESFDTSTAFGSATVGMLSVFAQLERKSISERMITGRVERAKKGFYHTGGQDRPPAGYQFNSDNQLIINEYEAAAIKDLFRLYNDGLGKSSISEYLKKNYPGKNKWLPSSIDRMLKNSLYIGKVKFSGVEYDGIHEPIIDEVTFYKTQKEIARRKQSNTKRYNYVALLGGLCECGICGAKMANRRAVGRKGKVYRYYRCYSKKGSPKHMMKTDGCSSKAQQQFIIDEAVINNLKNIDVEAELKRRSAPQTNTSLISSQIESIDKQINKLIDLFQVDSMPLDVISEKIDKLNKEKQSMEKLLERKNRLDKTELQHRFDILKSFDWDNSSIESKRAVIEMLVQKVIIHDNSIEIILVE

SEQ ID NO: 68 - protein, 470 aa, Artificial Sequence
  Synthetic
MKGESELDKKAAIYIRVSTQEQATEGYSIQAQTDRLTKYVEAKDFILYKKYIDAGYSASKLERPAMQELIQDVQSKKVDVVIVYKLDRLSRSQKDTMYLIEDIFRPNDVELISMQESFDTSTAFGSATVGMLSVFAQLERKSISERMITGRVERAKKGFYHTGGQDRPPAGYQFNSDNQLIINEYEAAAIKDLFRLYNDGLGKSSISEYLKKNYPGKNKWLPSSIDRMLKNSLYIGKVKFSGAEYDGIHEPIIDEVTFYKTQKEIARRKQSNTKRYNYVALLGGLCECGICGAKMANRRAVGRKGKVYRYYRCYSKKGSPKHMMKTDGCSSKAQQQFIIDEAVINNLKNIDVEAELKRRSAPQTNTSLISSQIESIDKQINKLIDLFQVDSMPLDVISEKIDKLNKEKQSMEKLLERKNKLDKTELQHRFDVLKSFDWDNSSIESKRVVIEMLVQKVIIHDNSIEIILVE

SEQ ID NO: 69 - protein, 464 aa, Artificial Sequence
  Synthetic
MDKKAAIYIRVSTQEQATEGYSIQAQTDRLTKYVEAKDFILYKKYIDAGYSASKLERPAMQELIQDVQSKKVDVVIVYKLDRLSRSQKDTMYLIEDIFRPNDVELISMQESFDTSTAFGSATVGMLSVFAQLERKSISERMITGRVERAKKGFYHTGGQDRPPAGYQFNSDSQLIINEYEAAAIKDLFRLYNDGLGKSSISEYLKKNYPGKNKWLPSSIDRMLKNSLYIGKVKFSGTEYDGIHEPIIDEVTFYKTQKEIARRKQTNTKRYNYVALLGGLCECGICGAKMANRRAVGRKGKVYRYYRCYSKKGSPKHMMKTDGCSSKAQQQFIIDEAVINNLKNIDVEAELKRRSAPQTNTSLISSQIESIDKQINKLIDLFQVDSMPLDVISEKIDKLNKEKQSMEKLLERKNKLDKTELQHRFDVLKSFDWDNSSIESKRVVIEMLVQKVIIHDNSIEIILVE

SEQ ID NO: 70 - protein, 470 aa, Artificial Sequence
  Synthetic
MKGESELDKKAAIYIRVSTQEQATEGYSIQAQTDRLIKYVEAKDFILYNKYIDAGYSASKLERPAMQELIQDVQSKKVDVVIVYKLDRLSRSQKDTMYLIEDIFRPNDVELISMQESFDTSTAFGSATVGMLSVFAQLERKSISERMITGRVERAKKGFYHTGGQDRPPAGYQFNSDNQLIINEYEAAAIKDLFRLYNDGLGKSSISEYLKKNYPGKNKWLPSSIDRMLKNSLYIGKVKFSGAEYDGIHEPIIDEVTFYKTQKEIARRKQTNTKRYNYVALLGGLCECGICGAKMANRRAVGRKGKVYRYYRCYSKKGSPKHMMKTDGCSSKAQQQFIIDEAVINNLKNIDVEAELKRRSAPQTNTSLISSQIESIDKQINKLIDLFQVDSMPLDVISEKIDKLNKEKQSMEKLLERKNRLDKTELQHRFDVLKSFDWDNSSIESKRVVIEMLVQKVIIHDNSIEIILVE

SEQ ID NO: 71 - protein, 470 aa, Artificial Sequence
  Synthetic
MKGESELDKKAAIYIRVSTQEQATEGYSIQAQTDRLIKYVEAKDFILYKKYIDAGYSASKLERPAMQELIQDVQSKKVDVVIVYKLDRLSRSQKDTMYLIEDIFRPNDVELISMQESFDTSTAFGSATVGMLSVFAQLERKSISERMITGRVERAKKGFYHTGGQDRPPAGYQFNSDNQLIINEYEAAAIKDLFRLYNDGLGKSSISEYLKKNYPGKNKWLPSSIDRMLKNSLYIGKVKFSGAEYDGIHEPIIDEVTFYKTQKEIARRKQTNTKRYNYVALLGGLCECGICGAKMANRRAVGRKGKVYRYYRCYSKKGSPKHMMKTDGCSSKAQQQFIIDEAVINNLKNIDVEAELKRRSAPQTNTSLISSQIESIDKQINKLIDLFQVDSMPLDVISEKIDKLNKEKQSMEKLLERKNKLDKTELQHRFDVLKSFDWDNSSIESKRVVIEMLVQKVIIHDNSIEIILVE

SEQ ID NO: 72 - protein, 458 aa, Artificial Sequence
  Synthetic
MNYERSYLRSCQVSTLEQKEHGYSIEEQERKLKSFCEINDWSVSDVFIDAGFSGAKRERPELQRMMNDIKRFDLVLVYKLDRLTRNVRDLLDLLEIFEQNNVAFRSATEVYDTSTAMGRLFVTLVGAMAEWERETIRERVMMGKRAAIKQGMILTPPPFYYDRVDNTYIPNDYKKVVLWAYDEVMKGVSSKGIARKLNDSDIPPPNGKRWEDRTITRALRSPITRGHYTWGDVFIENSHEPIITEEMYQQIKERLEERINTKIVSHVSVFRGKFICPRCGGTLTLNTVTRKRKKGYVTYKTYYCNTCKAKKESFGFSENEALRVFRDYLSELDLDKYKVKTKQNDDVVTIDIDKIMEQRKRYHKLYAKGLMQEEELFELIKETDETIAEYEKQKELVPRKSLDIDKIKKFKNALLESWEIFSLEDKADFIKMAIKSIDIEYVKLKNRHSIEIKDIEFY

SEQ ID NO: 73 - protein, 458 aa, Artificial Sequence
  Synthetic
MNYERSYLRSCQVSTLEQKEHGYSIEEQERKLKSFCEINDWSISDVFIDAGFSGAKRERPELQRMMKDIKRFDLVLVYKLDRLTRNVRDLLDLLEIFEQNNVAFRSATEVYDTSTAMGRLFVTLVGAMAEWERETIRERVMMGKRAAIKQGMILTPPPFYYDRVDNTYVPNNYKKVVLWAYDEVLKGVSSKGIARKLNDSDIPPPNGKRWEDRTITRALRSPITRGHYTWGDVFIENSHEPIITEEMYQQIKERLEERINTKIVSHVSVFRGKFICPKCGGTLTMNTATRKRKKGYVTYKTYYCNTCKTKKQSFGFSENEALRVFRDYLSKLDLEKYEIKTKQKDDVVTIDIDKIMEQRKRYHKLYAKGLMQEEELFELIKETDETIAEYEKQKELAPSKTLDVAKIKKFKNALLESWKIFSLEDKADFIKMAIKSIDIDYVKLKNRHSIKINDIEFY

SEQ ID NO: 74 - protein, 458 aa, Artificial Sequence
  Synthetic
MNYERRYIRSCQVSTLEQKEHGYSIEEQERKLKSFCEINDWSVSDVFIDAGFSGAKRDRPELQRMMNDIKRFDLVLVYKLDRLTRNVRDLLDLLEIFEQNNVAFRSATEVYDTSTAMGRLFVTLVGAMAEWERETIRERVMMGKRAAIKQGMILTPPPFYYDRVDNTYIPNDYKKVVLWAYDEVMKGNSSKAIARKLNDSDIPPPNGKRWEDRTITRALRNPITRGHYTWGDVFIENSHEPIITEEMYQQIKERLEERINTKIVSHVSVFRGKFICPRCGGTLTMNTATRKRKKGYVTYKTYYCNTCKTRKQSFGFSENEALRVFRDYLSKLDLDKYEVKTKQKDDVVTIDIDKIMEQRKRYHKLYAKGLMQEEELFELIKETDETIAEYEKQKELVPRKILDIDKIKSFKNVLLESWNIFSLEDKADFIKMAIKSIEIEYVELKNRHSIEIKEIEFY

SEQ ID NO: 75 - protein, 515 aa, Artificial Sequence
  Synthetic
MKTAIYLRKSRADLEAEARGEGETLAKHRTTLLKIAKELNLDVLSVREEIVSGESLVKRPEMLALLEEIEDNKYDVVLCMDMDRLGRGGMKEQGIILETFKRSNTKIMTPRKTYDLNDEWDEEYSEFEAFMARKELKIITRRMQRGRIASVEAGNYLGTHAPYGYDILRLNKRERTLTINSEEASVVRMIFEWYANEDMGASVITNKLNQLGYKSKLGNDWNPYSVLDMLKNNIYIGKVTWQKRKEVKRPDATKRSCARQDKSEWIIADGKHDPIISKSLFEKAQEKLNTRYHVPYNTNGLKNPLAGIIRCGKCGYSMVQRYPKNRKKTMDCKHRGCENKSSYTELIERRLLEALKEWYINYKADFAKNNQDSLSKEKQVIKINQAALRKLEKELLDVQKQKNNLHDLLERGVYTVDMFLERSNVVSDRMNEITEMMENLQKEINTEIKKERVKKDTIPQVEHVLDLYFKTDDPKKKNSLLKSVLEKAVYTKEKWQRLDDFKLVLYPRLPKDGDK

SEQ ID NO: 76 - protein, 511 aa, Artificial Sequence
  Synthetic
MKIAIYSRKSVSTDKGESIKNQIEICKEYFLRRNTNIEFEIFEDEGFSGGNTNRPAFKFMMSKIKMFDVVACYKIDRIARNIVDFVNVYDELNKLGIKLISVTEGFDPSTPLGKLIMMILASFAEMERENIRQRVKDNMKELAKAGRWTGGNVPFGFISQRIEEGGKKATYLKLDENKKQLIKEIFDMYISANSMHKVQKQLYIIHNIKWSLSTIKNILTSPVYVKADKDVVKYLNNFGKVFGEPNGANGMITYNRRPYTNGKHRWNDKGMFYSISRHEGIIDSSTWLKVQSIQEKTKVAPRPKNSKVSYLTGILKCAKCGSPMTISYNHKNKDGSITYVYLCTGRKTYGKEYCTCKQVKQTIMDKEIENALNSYIQLNIEEFKKVIGSPNDTENFNKNILCIEKKIETNKVKINNLVDKISILSNTASAPLLSKIEELTKLNEDLKKELLFIQQEHINSTFVSPEEKYERLKQFSYTLNTNDIDLKRELLSFSVQEIKWDSDEKCIDIII

SEQ ID NO: 77 - protein, 438 aa, Artificial Sequence
  Synthetic
MHKAAAYARYSSDNQREESIEAQLRAIREYCQKNNIQLVKIYTDEAKSATTDDRPGFLQMIQDSSMGLFSAVIVHKLDRFSRDRYDSAFYKRQLKKNGVRLISVLENLDDSPESIILESVLEGMAEYYSRNLAREVMKGMRETALQCKHTGGKPPLGYDVAEDKTYIVNEQEAQAVRLIFEMYASGKGYSDIMYALNKEGYRTQTGRPFGKNSIHDILRNEKYRGVFIFNRTERKINGKRNHHRNKDDSEIIRIEGGMPRIIDDETWERVQERMSKNKKGANSAKENYLLAGLIYCGKCGGAMTGNRHRCGRNKTLYVTYECSTRKRTKECDMKAINKDYIENLVIEHLEKNVFAPEAIERLVAKISEYAASQVEEINRDIKTFTDQLAGIQTEINNIVNAIAAGMFHPSMKEKMDELETKKANLLLKLEEAKFVFCK

SEQ ID NO: 78 - protein, 452 aa, Artificial Sequence
  Synthetic
MKAAIYIRVSTQEQVENYSIQAQTEKLTALCRSKDWDVYDIFIDGGYSGSNMNRPALNEMLSKLHEIDAVVVYRLDRLSRSQRDTITLIEEYFLKNNVEFVSLSETLDTSSPFGRAMIGILSVFAQLERETIRDRMVMGKIKRIEAGLPLTTAKGRTFGYDVIDTKLYINEEEAKQLQMIYDIFEEEKSITSLQKRLKKLGFKVKSYSSYNNWLTNDLYCGYVSYADKVHTKGVHEPIISEEQFYRVQEIFSRMGKNPNMNRDSASLLNNLVVCSKCGLGFVHRRKDTVSRGKKYHYRYYSCKTYKHTHELEKCGNKIWRADKLEELIIDRVNNYSFASRNVDKEDELDNLNEKLKTEHTKKKRLFDLYISGSYEVSELDAMMADIDAQINYYEAQIEANEELKKNKKIQENLADLATVDFDSLEFREKQLYLKSLINKIYIDGEQVTIEWL

SEQ ID NO: 79 - protein, 517 aa, Artificial Sequence
  Synthetic
MKTIHKLARPQLPEPPKLKVAAYARASTSSNEQLASLQTQITHYENHIQNNDQWEYVGVYYDEGTSGTKVEKRDGLHRLIKDAELGKIDLILTKSISRFSRNTVDCLNLVRKLTDIGVTIFFEKENINTGDMESELLLSILSSLAESESYSHSENMKWANRKRMAKGIFKTVPPYGYQRKGADFYLIPDEAKVIEQIFKWALEGVSAYQVAKRLNEKNIFTRKGSKWQDSGINNILHNIVYTGTMIHQRYFNDDQFRKKKNNGELPMYRIDNNHPPIISWEDYERVQELITLRANAKGTSKGSQKYSQRYVFTKRIICDKCGCNYKRVHIAGKGNTKVVKWSCTGHLKNKDGCDALPITDESLKTAYLTMLNKLILGHTIVLEPLINTPVEGKASKQELEKLSIEITKIDEKLEVLASLNASGVVSTKTALEEQGRLQMELNKLQEKQHKIMESVNGTSTQRIQLEQLHQFTKRSEMLTEWDEDLFLRFAELIVVYSRQEVSFELKCGLLLKERLEA

SEQ ID NO: 80 - protein, 527 aa, Artificial Sequence
  Synthetic
MPIQKSRRLSKVAGKKVTVIPMKPRQWAAENTEEKPKLKVAAYCRVSTEMEEQASSYEAQVQHYTDYIQRNPDWELAGIFADEGISGTGTKKRDGFNRMIEACQKGDVEYIITKSISRFARNTVDCLQYIRQLKDLHIAVFFEKENINTMDAKGEVLLTIMASLAQQESQSLSQNTKMGVQYRFQQGQLRINHNHFLGYTKDEDGNLVIEPKEAEVIKRIFREYLEGSSLQEIANGLMSDGILTGGKRKLWRGEGVRLILRNEKYMGDALLQKTYTTDFLTKKRVKNDGSYAQQYYVENSHPAIIPRDIFMQVQQELDRRKSMKNKHSQCFSGKYALSGITVCGDCGNAYRRVHWKNRGTVWRCKSRVDKREHNCSGRTIYEKDLHEAIIKAINETVVDREDFLQQLSENINSVLTDGLTGRLEELDSKLKELESEIISMAIGGQGYDELASQIFSLRDERDAVAKQIAANTNLQQRVDEMVVFVKEHDVINEYSEVLVRRLIEKVTIFEKNIVVDFKSGVRVTVEI

SEQ ID NO: 81 - protein, 452 aa, Artificial Sequence
  Synthetic
MKAAIYIRVSTQEQIENYSIQAQTEKLTALCRSKDWDVYDIFIDGGYSGSNMNRPALNEMLSKLHEIDAVVVYRLDRLSRSQRDTITLIEEYFLKNNVEFVSLSETLDTSSPFGRAMIGILSVFAQLERETIRDRMVMGKIKRIEAGLPLTTAKGRTFGYDVIDTKLYINEEEAKQLRLIYDIFEEEQSITFLQKRLKKLGFKVRTYNRYNNWLTNDLYCGYVSYKDKVHVKGIHEPIISEEQFYRVQEIFSRMGKNPNMNKESASLLNNLVVCSKCGLGFVHRRKDTVSRGKKYHYRYYSCKTYKHTHELEKCGNKIWRADKLEELIIDRVNNYSFASRNIDKEDELDSLNEKLKIEHTKKKRLFDLYISGSYEVSELDAMMSDIDAQINYYEAQIEANEELKKNKKIQENLADLATVDFNSLEFREKQLYLKSLINKIYIDDEQVTIEWL

SEQ ID NO: 82 - protein, 469 aa, Artificial Sequence
  Synthetic
MRYTTPVRAAVYLRISEDRSGEQLGVARQREDCLKLCGQRKWVPVEYLDNDVSASTGKRRPAYEQMLADITAGKIAAVVAWDLDRLHRRPIELEAFMSLADEKRLALATVAGDVDLATPQGRLVARLKGSVAAHETEHKKARQRRAARQKAERGHPNWSKAFGYLPGPNGPEPDPRTAPLVKQAYADILAGASLGDVCRQWNDAGAFTITGRPWTTTTLSKFLRKPRNAGLRAYKGARYGPVDRDAIVGKAQWSPLVDEATFWAAQAVLDAPGRAPGRKSVRRHLLTGLAGCGKCGNHLAGSYRTDGQVVYVCKACHGVAILADNIEPILYHIVAERLAMPDAVDLLRREIHDAAEAETIRLELETLYGELDRLAVERAEGLLTARQVKISTDIVNAKITKLQARQQDQERLRVFDGIPLGTPQVAGMIAELSPDRFRAVLDVLAEVVVQPVGKSGRIFNPERVQVNWR

SEQ ID NO: 83 - protein, 472 aa, Artificial Sequence
  Synthetic
MEKVAIYIRVSKKEQTRDKGSDSSLNLQLKKCLDYCKEKGYEVLKVYQDIESGRIDDRKEFNELFEAISKKIYTKIVFWEISRIARKISTGMKFFEELELYKITFDSISQPYLKDFMTLSIFLAWGTEDLKQMSLRIKSNLEEKTKAGYFVHGRPATGYIRGENKMIIPDPEKAPYILSIFETYAKNFNLTETARIFNKTRMDIVDIIDNKIYIGYVPFRKYIQELNQKKRIQVSKKDIKWYKGLHEPIVPLELFEFCQSIREKNIKSRAAYGDYKPHLLFSSMIYCECGDKMYQQKRNRTYKDNTNYVYYSYSCKNRKHKKSFSARIMDKTIKEMILNSKELEDLNNYNSNDIEKNEKKLLKLEKNLKVLENERERIINLFQKSYISEDELENRFKDLNARIKIAKEKKIEFEKNLNIPKNNDIKLLEKLKFIIENYDEEDVIETRKILKMLIKEIRVISFYPLKISILFY

SEQ ID NO: 84 - protein, 476 aa, Artificial Sequence
  Synthetic
MQTLQAKIAVKYSRVSTNKQDLRGSKDGQEAEIDKFAIANNFTIISSFTDTDHGDIAKRKGLSSMKEYLRLNQAVKYVLVYHSDRFTRSFQDGMRDLFFLEDLGIKLISVLEGEIVADGTFNSLPSLVRLIGAQEDKAKIIKKTTDASYKYAKTNRYLGGNILPWFKLESGYVYGKKCKVIVKNEATWEYYRGFFLAMIKYKNILRAAKEYNLNSFTVAEWLTKPELIGYRTYGKKGKIDQYHNKGRRKNYQTTEEKIFPAILTEEEFLVLNEMRKYNRAKYNKDIYTYLYSNLSYHSCGGKLEGERIKKKDSFVYYYKCNCCKKRFNQKKIETAIAENILNNPGLQIINDINFRLADIYDEIKNINNMIEEENSSEKRILSLVSKNVVGVEAAEEELLKIKKQKNFLKKLLEEKIKLIEEENKKEITEDHISLLKNLLEYSQEDDDDFRGKLKEIINLIVRKIEVSSLDKINIIF

SEQ ID NO: 85 - protein, 472 aa, Artificial Sequence
  Synthetic
MEKVAIYIRVSKKEQTRDKGSDSSLNLQLKKCLDYCKEKGYEVLKVYQDIESGRIDDRKEFNELFEAISKKIYTKIVFWEISRIARKISTGMKFFEELELYKITFDSISQPYLKDFMTLSIFLAWGTEDLKQMSLRIKSNLEEKTKAGYFVHGRPATGYIRGENKMIIPDPEKAPYILSIFETYAKNFNLTETARIFNKTRMDIVDIIDNKIYIGYVPLRKYVKELNQKNRTQVSKKDIKWYKGLHEPIVPLELFEFCQSIREKNIKSRVVYGDYKPYLLFSSMIYCECGDKMYQQKRNRSYKDNTKYAYYSYSCKNRKHRKSFSAKIMDKTIKEMILNSKELEDLNNYNSNDIEKNEKKLLKLEKNLKVLENERERIINLFQKSYISEDELENRFKDLNARIKIAKEKKIEFEKNLNIPKNNDIKLLEKLKFIIENYDEEDVIETRKILKMLIKEIRVISFYPLKISILFY

SEQ ID NO: 86 - protein, 525 aa, Artificial Sequence
  Synthetic
MAQRKVTAIPATITKYTAVPIGSKRKRRVAGYARVSTDHEDQVTSYEAQVDYYTNYIKGRDDWEFVAIYTDEGISATNTKRREGFKAMVADALAGKIDLIVTKSVSRFARNTVDSLTTVRTLKEKGVEIYFEKENIWTLDAKGELLITIMSSLAQEESRSISENTTWGQRKRFADGKASVAYKRFLGYDRGPNGGFVVNQEQAKTVKLIYKLFLDGLTCHAIAKELTERKLPTPGGKAVWSQSTVRSILTNEKYKGDALLQKEFTVDFLQKKTKKNEGEVPQYYVEGNHEAIIDPATFDYVQAEMARRMKDKHRYSGVSMFSSKIKCGECGCWYGSKVWHSTDKYRRVIYQCNHKYKGGKTCGTPHVTEKQVKGAFVRATNILLSERDELTANTRMVIVMLCDSTELEKRQAELKEELEVVVGLVERCVAENARTALDQDEYTERYNGLVSRYETVKTRFDEVTQAIADKADRKKLLEQFLHTVETQEPVTQFDERLWSSLVDFVTVYSEKDIRVTFKDGTEIQV

SEQ ID NO: 87 - protein, 592 aa, Artificial Sequence
  Synthetic
MPNLRKIEAAVPAIREKKKVAAYARVSMQSERMLHSLSAQVSYYSGLIQKNPDWEYAGVYADDFISGTNTVKRDEFKRMLADCEAGKIDIILTKSISRFARNTVDLLETVRHLKDLGVEVQFEKERIRSMDGDGELMLTILASFAQEESRSISDNVKWGIRKRMQNGIPNGHFRIYGYRWEGDELVIVPEEAEVVKRIFRNFLDGKSRLETERELAAEGITTRDGCRWVDSNIKVVLTNVTYTGNLLLQKEFISDPISKQRKKNRGELPQYYVEDTHPAIIDKATFDFVQEEMARRRELGALANKSLNTSCFTGKIKCPYCGQSYMHNKRTDRGDMEFWNCGSKKKKKKGTGCPVGGTINHKNMVKVCTEVLGLDEFDEAIFLEKVDHIDVPERYTLEFHMADGNVVTKDCLNTGHRDCWTPERRAEVSMKRRKNGTNPIGASCFTGKIKCVSCGCNFRKATRNCKDGSKVSHWRCAEHNGCDSPSLREDLLEQMAAEVLGLDAFDAAAFREKIDRVEVLSSSELRFCFKDGRTVSRNWQPPERVGRPWTEEQRAKFKESIKGAYTPERRRQMSEHMKQLRKERGDKWRREK

SEQ ID NO: 88 - protein, 462 aa, Artificial Sequence
  Synthetic
MTVGIYIRVSTEEQAREGFSISAQREKLKAYCISQDWQDYKFYVDEGKSAKDTNRPYLKLMLDHIQQGLINVVLVYRLDRLTRSVKDLYKLLDLFDKNNCIFRSATEVYDTGSATGRLFITLVAAMAQWERENLGERVTMGQVEKARQGQYSAPAPFGFKKQDETLVKDKKQGYILMDMIDKVKKGWSIRQIAKYLDQSYLPIRGYKWHIATILSILHNPALYGALRWKDELNETSHEGYLTKEEFEELQNILYSRQNFRKRQIESAHIFQMKLVCPQCGNRLGCERSVYFRKKDQKNVESLHYRCQSCALNERPSISVSEKKLEKALLLFMKNVKFDLEPVVKEEKNETTEIQNAIVKIERQREKFQKAWASDLMTDEEFTARMSETRKAHENFTKRLSEIQRATPVPIDIKKAKKLVNEFKINWAYLNTEEKREFVQSFIEKIEFTKKDQNPHILNVSFY

SEQ ID NO: 89 - protein, 489 aa, Artificial Sequence
  Synthetic
MLKEVRCAIYTRKSNEDGLEQKFNSLDAQRVVCEKYIKSREGWVALAKKYDDGGFSGSNLNRPAIKELFEDVKVGEVDCVVVYTLDRLSRETKDCIEVTSFFRRHRISFVAVTQIFDNNTPMGKFVQTVLSGAAQLEREMIVERVKNKIATSKEQGLWMGGNPPLGYDVKEKELIINEKEAKIIKHIFERYMELKSMAELARELNREGYRTKAKSDIFKKATVRRIITNPIYMGKIRHYEKQYKGKHEAIIEEEKWQKAQELISNQPYRKAKYEEALLKGIIKCKSCDVNMTLTYSKKENKRYRYYVCNNHLRGKNCESVNRTIVAGEIEKEVMKRAECLYGDGENLSFREQKEAMKKLIKGVMVKEDGIEVCSESEEKFIPMKKKGNKCIVIEPEGKTNNALLKAVVRAHSWKRQLEEGKYRSVKELSKKINVGTRRIQQILRLNYLAPKIKEDIVNGRQPRGLKLVDLKEIPMLWSEQREKFYGLDL

SEQ ID NO: 90 - protein, 470 aa, Artificial Sequence
  Synthetic
MKGESELDKKAAIYIRVSTQEQATEGYSIQAQTDRLTKYVEAKDFILYKKYIDAGYSASKLERPAMQELIQDVQSKKVDVVIVYKLDRLSRSQKDTMYLIEDIFRPNDVELISMQESFDTSTAFGSATVGMLSVFAQLERKSISERMITGRVERAKKGFYHTGGQDRPPAGYQFNSDNQLIINEYEAAAIKDLFRLYNDGLGKSSISEYLKKNYPGKNKWLPSSIDRMLKNSLYIGKVKFSGAEYDGIHEPIIDEVTFYKTQKEIARRKQSNTKRYNYVALLGGLCECGICGAKMANRRSVGRKGKVYRYYRCYSKKGSPKHMMKTDGCSSKAQQQFIIDEAVINNLKNIDVEAELKRRSAPQTNTSLISSQIESIDKQINKLIDLFQVDSMPLDVISEKIDKLNKEKQSMEKLLERKNRLDKTELQHRFDILKSFDWDNSSIESKRAVIEMLVQKVIIHDNSIEIILVE

SEQ ID NO: 91 - protein, 470 aa, Artificial Sequence
  Synthetic
MKGESELDKKAAIYIRVSTQEQATEGYSIQAQTDRLIKYVEAKDFILYKKYIDAGYSASKLERPAMQDLIQDVQSKKVDVVIVYKLDRLSRSQKDTMYLIEDIFRPNDVELISMQESFDTSTAFGSATVGMLSVFAQLERKSISERMITGRVERAKKGFYHTGGQDRPPAGYQFNSDNQLIINEYEAAAIKDLFRLYNDGLGKSSISEYLKKNYPGKNKWLPSSIDRMLKNSLYIGKVKFSGAEYDGIHEPIIDEVTFYKTQKEIARRKQTNTKRYNYVALLGGLCECGICGAKMANRRAVGRKGKVYRYYRCYSKKGSPKHMMKTDGCSSKAQQQFIIDEAVINNLKNIDVEAELKRRSAPQTNTSLISSQIESIDKQINKLIDLFQVDSMPLDVISEKIDKLNKEKQSMEKLLERKNKLDKTELQHRFDVLKSFDWDNSSIESKRVVIEMLVQKVIIHDNSIEIILVE

SEQ ID NO: 92 - protein, 448 aa, Artificial Sequence
  Synthetic
MRTGLYVRVSTAEQEKHGYSIKVQLEKLRAFASAKDYTVVKEYIDAAQSGAKLERPGLKQLIEDVENNALDCVLVYRLDRLSRSQKDTMYLIEDVFLKNSVAFVSLQESFDTTSSFGRAMIGMLSVFAQLERDNITERLFSGRAHRAKRGFHHGGGIIPFGYRYDVETGELKRFENESNEVKAMFEMIANGKSVSSVAKEFNTYDTTIRRRIANSVYIGKIQFDGETFDGQHEPIISKELFDKANVRMNARASNLPFKRTYLLSGLIYCGKCGERCSAYESRSKHNGKEYRRAYYRCNARTWKYKQKHGRTCEQPHIRVDELEQAVMEQVKRLPLKHKVKKRAFDFKPVENKIATIDKQKERLLDLYLNEHLDNEMFNKKSKELDKSRDKLAKQLERMRMQAADSVESYQWLDGIDWDALDKDTLREVLERIIERIVIRDKDVEIYFK

SEQ ID NO: 93 - protein, 470 aa, Artificial Sequence
  Synthetic
MKGESELDKKAAIYIRVSTQEQATEGYSIQAQTDRLTKYVEAKDFILYKKYIDAGYSASKLERPAMQELIQDVKSKKVDVVIVYKLDRLSRSQKDTMYLIEDIFRPNDVELISMQESFDTSTAFGSATVGMLSVFAQLERKSISERMITGRVERAKKGFYHTGGQDRPPAGYQFNSDNQLIINEYEAAAIKDLFRLYNDGLGKSSISEYLKKNYPGKNKWLPSSIDRMLKNSLYIGKVKFSGAEYDGIHEPIIDEVTFYKTQKEIARRKQTNTKRYNYVALLGGLCECGICGAKMANRRAVGRKGKVYRYYRCYSKKGSPKHMMKTDGCSSKAQQQFIIDEAVINNLKNIDVEAELKRRSAPQTNTSLISSQIESIDKQINKLIDLFQVDSMPLDVISEKIDKLNKEKQSMEKLLERKNKLDKTELQHRFDVLKSFDWDNSSIESKRVVIEMLVQKVIIHDNSIEIILVE

SEQ ID NO: 94 - protein, 471 aa, Artificial Sequence; identical to SEQ ID NO: 40
  Synthetic

SEQ ID NO: 95 - protein, 452 aa, Artificial Sequence
  Synthetic
MKAAIYIRVSTQEQVENYSIQAQTEKLTALCRSKDWDVYDTFIDGGYSGSNMNRPALNEMLSKLHEIDAVVVYRLDRLSRSQKDTITLIEEYFLKNNVEFVSLSETLDTSSPFGRAMIGILSVFAQLERETIRDRMVMGKIKRIEAGLPLTTAKGRTFGYDVIDTKLYINEEEAKQLRLIYDIFEEEQSITFLQKRLKKLGFKVRTYNRYNNWLTNDLYCGYVSYKDKVHVKGIHEPIISEEQFYRVQEIFSRMGKNPNMNKESASLLNNLVVCSKCGLGFVHRRKDTVSRGKKYHYRYYSCKTYKHTHELEKCGNKIWRADKLEELIIDRVNNYSFASRNIDKEDELDSLNEKLKIEHAKKKRLFDLYINGSYEVSELDSMMNDIDAQINYYEAQIEANEELKKNKKIQENLADLATVDFNSLEFREKQLYLKSLINKIYIDGEQVTIEWL

SEQ ID NO: 96 - protein, 471 aa, Artificial Sequence
  Synthetic
MRKVAIYSRVSTINQAEEGYSIQGQIEALTKYCEAMEWKIYKNYSDAGFSGGKLERPAITELIEDGKNNKFDTILVYKLDRLSRNVKDTLYLVKDVFTANNIHFVSLKENIDTSSAMGNLFLTLLSAIAEFEREQIKERMQFGVMNRAKSGKTTAWKTPPYGYRYNKDEKTLSVNELEAANVRQMFDMIISGCSIMSITNYARDNFVGNTWTHVKVKRILENETYKGLVKYREQTFSGDHQAIIDEKTYNKAQIALAHRTDTKTNTRPFQGKYMLSHIAKCGYCGAPLKVCTGRAKNDGTRRQTYVCVNKTESLARRSVNNYNNQKICNTGRYEKKHIEKYVIDVLYKLQHDKEYLKKIKKDDNIIDITPLKKEIEIIDKKINRLNDLYINDLIDLPKLKKDIEELNHLKDDYNKAIKLNYLDKKNEDSLGMLMDNIDIRKSSYDVQSRIVKQLIDRVEVTMDNIDIIFKF

SEQ ID NO: 97 - protein, 461 aa, Artificial Sequence; identical to SEQ ID NO: 13
  Synthetic

SEQ ID NO: 98 - protein, 460 aa, Artificial Sequence
  Synthetic
MKVAIYTRVSTLEQREKGHSIDEQERKLRSFCDINDWTVKDVYVDAGFSGAKRDRPELTRLLDDISEFDLVLVYKLDRLTRSVRDLLDLLEVFENNNVAFRSATEVYDTTTAIGRLFVTLVGAMAEWERETIRERSLMGKRAAIKKGMILTAPPFYYDRVNNTYIPNQYKDVVLDVYNKVKKGYSIAHIARLYNNSDVKPPNGNEEWTTRMLMHALRNPVTRGHYQWGEIYIEDSHEPIITDEMYNTIIDRLDKHTNTKVVAHTSVFRGKLICPNCGYALTLNSQKRKRKNDTIVYKTYYCNNCKITKGMKPHHITETETLRVFKDHLSKIDLKQYETQEKEKQSHVTIDLSKVMEQRKRYHKLYASGMMQENELFELIKETDEMIEEYEKQRKQVDVKEFDICKIKEIKDVLLKSWDIFTLEDKADFIQMSIKAINIEYTKLKRGKSSNSMKIKDIEFY

SEQ ID NO: 99 - protein, 533 aa, Artificial Sequence
  Synthetic
MPKVSVIPAKQVQVINGIKDKKKKRVCAYCRVSTDTDEQLTSYEAQVTYYESYIRGKPEYEFAGIFADEGITGTNTKHRTEFKRMIDEALAGKFDMIITKSISRFARNTLDCLKYVRLLRDKGIGVYFEKENIDTLDSKGEVLLTILSSLAQDESRNISENSRWGIVRRFQQGKVRVNHKRFLGYDKDENGELIIDEEQAKIVRRIYKEYLEGKGIRAIGKDLERDNILTGAGGRKWHDSTIQKILRNEKYSGDALLQKTITTDFLTHKRVKNKGEVQQYYVEDSHPAIISKEMFRMVQEEIKRRASLIGYSEKTKSRYTNKYAFSGRIVCGNCGSKFRRKRWGPGEKYKKYVWLCANHIDNGLKACSMKAVSEEKLKAAFVRSINKIIENKEAFIKTMMENISRVSESKEDRSELKIINESLEELKEQMMNLVRLNVRSSLDNQIYDEEYERLEEEIKQLKEKKAGFDNTELIKKEGIQEVKEIERILRDRQDIIKDFDRELFMQIVDKVKVISLVEVEFIYKSGVVVKEIL

SEQ ID NO: 100 - protein, 462 aa, Artificial Sequence
  Synthetic
MKVAIYVRVSTDEQAKEGFSIPAQRERLRAFCASQGWEIVQEYIEEGWSAKDLDRPQMQRLLKDIKKGNIDIVLVYRLDRLTRSVLDLYLLLQTFEKYNVAFRSATEVYDTSTAMGRLFITLVAALAQWERENLAERVKFGIEQMIDEGKKPGGHSPYGYKFDKDFNCTIIEEEADVVRMIYRMYCDGYGYRSIADRLNELMVKPRIAKEWNHNSVRDILTNDIYIGTYRWGDKVVPNNHPPIISETLFKKAQKEKEKRGVDRKRVGKFLFTGLLQCGNCGGHKMQGHFDKREQKTYYRCTKCHRITNEKNILEPLLDEIQLLITSKEYFMSKFSDRYDQQEVVDVSALTKELEKIKRQKEKWYDLYMDDRNPIPKEELFAKINELNKKEEEIYSKLSEVEEDKEPVEEKYNRLSKMIDFKQQFEQANDFTKKELLFSIFEKIVIYREKGKLKKITLDYTLK

SEQ ID NO: 101 - protein, 523 aa, Artificial Sequence
  Synthetic
MELSRNITVIPARKRVGNTAAAEQRPKLKVAAYCRVSTDSEEQASSYEVQVAHYTQFIQKNPEWELAGIYADDGITGTNTKKREEFNRMIQDCMDGNIDMIITKSISRFARNTLDCLKYIRELKEKNIPVFFEKENINTMDSKGEVLLTIMASLAQQESQSLSQNIKLGLQYRFQNGEVRVNHSRFLGYTKDEEGNLIIEPAEAEVVKRIYREYLEGASLLQIGRGLEADGILTGAGKTKWRPETLKKILQNEKYIGDALLQKTYTIDFLSKKRVKNNGIVPQYYVENSHEPIIPRELFMQVQEEMVRRANLRGGKGGKKRVYSSKYALSSIVYCGQCGDIYRRVHWNNRGYKSIVWRCVSRLEEKGSECTAPTINEETLQAAVVKAINELLTKKEPFLSTLQKNIATVLNEENDNTTDDIDRKLEELQQQLLIQAKSKNDYEDVADEIYRLRELKQNALVENAEREGKRQRIAEMTDFLNEQSCELEEYDEQLVRRLIEKVTVFDEKMTIEFKSGVTIEGRI

SEQ ID NO: 102 - protein, 413 aa, Artificial Sequence
  Synthetic
MSVKKIRVNKQKNKQRICAYIRVSTTNGSQLESLENQKQYFINLYSNRDDIDFVGVYHDRGISGSKDNRPNFQAMIENCRKGMIDVIHTKSIARFARNTVTVLEISRELKAIGVDIFFEEQNIHTLSSEGEVMLSVLASIAEDELRSMSGNQRWAFQKKFQRGELVINTKRFLGYDLDENGELIINPEEALIVRQIFALYLEGYGTHRIAKLLNEKGVATVTGAKWHDTTIRQMLSNEKYNGSVLLQKYFHDGVNGPKKLNQGELEQYFIEDNHEAIISMEDWQTVQAKLNRRRWQQGRNKTYKFTGLLKCQHCGSTLKRQVSYKKKIVWCCSKYIKEGKAACQGMRVPEVDISNWTVTSPVKVIERDRDGEKYYSYSSQESADQYSSSGQEENQSSRILSSVHRPRRTAIKL

SEQ ID NO: 103 - protein, 506 aa, Artificial Sequence
  Synthetic
MKPRQWAAENTEEKPKLKVAAYCRVSTEMEEQASSYEAQVQHYTDYIQRNPDWELAGIFADEGISGTGTKKRDGFNRMIEACQKGDVEYIITKSISRFARNTVDCLQYIRQLKDLHIAVFFEKENINTMDAKGEVLLTIMASLAQQESQSLSQNTKMGVQYRFQQGQLRINHNHFLGYTKDEDGNLVIEPKEAEVIKRIFREYLEGSSLQEIANGLMSDGILTGGKRKLWRGEGVRLILRNEKYMGDALLQKTYTTDFLTKKRVKNDGSYAQQYYVENSHPAIIPRDIFMQVQQELDRRKSMKNKHSQCFSGKYALSGITVCGDCGNAYRRVHWKNRGTVWRCKSRVDKREHNCSGRTIYEKDLHEAIIKAINETVVDREDFLQQLSENINSVLTDGLTGRLEELDSKLKELESEIISMAIGGQGYDELASQIFSLRDERDAVAKQIAANTNLQQRVDEMVVFVKEHDVINEYSEVLVRRLIEKVTIFEKNIVVDFKSGVRVTVEI

SEQ ID NO: 104 - protein, 452 aa, Artificial Sequence
  Synthetic
MKAAIYIRVSTQEQIENYSIQAQTEKLTALCRSKDWDVYDIFIDGGYSGSNMNRPALNEMLSKLHEIDAVVVYRLDRLSRSQRDTITLIEEYFLKNNVEFVSLSETLDTSSPFGRAMIGILSVFAQLERETIRDRMVMGKIKRIEAGLPLTTAKGRTFGYDVIDTKLYINEEEAKQLQMIYDIFEEEKSITTLQKRLKKLGFKVKSYSSYNNWLTNDLYCGYVSYADKVHTKGVHEPIISEEQFYRVQEIFSRMGKNPNMNRDSASLLNNLVVCGKCGLGFVHRRKDTISRGKKYHYRYYSCKTYKHTHELEKCGNKIWRADKLEELIIDRVNNYSFASRNVDKEDELDNLNEKLKTEHKKKKRLFDLYISGSYEVSELDAMMADIDAQINYYEAQIEANEELKKNKKIQENLADLATVDFDSLEFREKQLYLKSLINKIYIDGEQVTIEWL

SEQ ID NO: 105 - protein, 489 aa, Artificial Sequence
  Synthetic
MPTRIILPKPEESKKKRTAAYCRVSSSSEEQLHSLAAQTSYYENFFASAKDAEFAGIYADSGLSGTRTKNRTEFLRLIEDCRAGMVDAIITKSVSRFGRNTVDTLVFTRELRNLGIDVFFEKEDLHSCSPEGELLLTLMAAMAESEVVSMSDNIKWGKRKRFEKGMIESLALNNIYGFRKTADGIDIFETEACVVRHIYELFLSGLGYAEIAKRLNAENAPTRRDGSVWESTTVKNIITNEKNCGNCLFQKTFIRDPLSHKSRPNKGELPQFLVEDCLPSIIDKETWLIAQRMRERNHRNGSSVPSEEYPFAGMLFCGICGAPVGFYYSKGEGFVMKTVYRCSSRKTRTAKAVEGVTYTPPHKSNYTKNPSPGLIEYREKYSGQYLQPRPMICTDIRIPLDRPQKAFVQAWNYIVGQRGRYHATLKRTVENNDDVLVRYRAREMLELFDGVGRLNTFDFPLMLRTLDRVETTKDEKLTFIFQSGIRITI

SEQ ID NO: 106 - protein, 549 aa, Artificial Sequence
  Synthetic
MSNKNVTVIPAKPTGFMQGLPGLITKRKVAGYARVSTDKDEQQNSYEAQVEYYTDYIKRNPEWEFVEVYTDEGISGTSTKHREGFKRMIADALDGKIDLILTKSVSRFARNTVDSLTTIRQLKDKGTEVYFEKENIFTMDSKGELLLTIMSSLAQEESRSISKNITWGKRKSMADGKVSFAYSSFLGYDMGADGHLYIVEDQAKIVHRIYDEFLAGKTTYDIAVRLTEDGIPTPMNKVKWQASTVSNILQNVKYRGDSILQQYFVEDFLTKKIKKNTGELPLYYVSQNHPPIIPPEKFEMVQEEFRRRKEGGPYTCISPFSGRIVCGNCGGFYGRKVWHSGSSYQSFVWHCNNKFTKRKYCSTPSVKEDAIMKCFVDAFNNLIARKDEIARNYEECLAAITDDSAYKTRLAEVENLSAGLATRMHDNLTRESRMMDDCGEDSPIKKERDEITVEYEALQKEHKELNSKIALCAAKKVQVRGFLQLLKKQKKALVEFDPLVWQAAVHYMVINEDCTVKFVFRDGTELPWVIDPGVKSYKKRKTVESCPQE

SEQ ID NO: 107 - protein, 434 aa, Artificial Sequence
  Synthetic
MEKQIIDITPTRTAFAVKQRVAAYARVSCDKDTMLHSLAAQIDYYRKYITRNPEWMFVGVYADEAKTGTKDDREQFQKLLSDCRSGLIDMVVTKSISRFARNTVTLLGTVRELKEIGINVFFEEQNINSISEEGELMLTLLASQAQEESLSCSENCKWKIRKGFERGQPNTCTMLGYRLVNGEITLVPDEAEIVKEIFDLYLSGCGVQKIANTLNKRSVRTEKIPFWHLDTIRGILRNEKYMGDLLLQKSLSESHLTKRQVKNEGQLQQFYINDDHEPIVSRTVFAETQSEVQRRAEKHKCKAGTKSVFTGKIRCGICGKNYRRKTTPHNIVWCCSTFNTRGKAFCASKAIPENTLKDCISHALGSKYFTEDFFTETVDFIVAEPCNTMRLIFKNGTEKRITWQDRSRSESWTDEMREAVRQRMLERDGQKNEQ

SEQ ID NO: 108 - protein, 548 aa, Artificial Sequence
  Synthetic
MTPAQAPATFQGSHVDTDGEPWLGYIRVSTWKEEKISPELQETALRAWAARTGRRLLEPLIIDLDATGRNFKRRIMGGIQRVEAGEARGIAVWKFSRFGRNNLGIAVNLARLEHAGGQLASATEDIDVRTAVGRFNRRILFDLAVFESDRAGEQWKETHQWRRAHGVPATGGRRLGYTWHPRRIPHPTLIGQWATQREWYEVEESARTHIERLYARKIGTDLRAPEGYGSLSAWLNSLGYRTGNGNPWRADSVRRYMLSGFAAGLLRIHDLECRCDYTANGGQCIRWTHIDGAHEAIITPETWERYVAHVAERRRMAPRVRNPTYPLTGLIRCGGCREGAAATSARRAAGQILGYAYACGQSRSGLCDSPVWVQRAIVEDELLLWISREVAAEVDAAPPTGIPQQRDDGTERTQAERARLEGEHTRLTNALTNLAVDRATNPEKYPDGIFEAAREQILQQKRAVSEALEAHTMVAALPQRSTLIPLAVGLLDEWDTFHPPETNGILRSLLRRVVITRGAAGRKGVRGSAQTKIEFHPAWEPDPWEGLE

SEQ ID NO: 109 - protein, 447 aa, Artificial Sequence
  Synthetic
MKVAIYLRVSTQEQVDNYSIEAQRERLEAFCKAKGWTVYDVYVDAGFTGSNTDRPGLQRLLMELDKVDVVAVYKLDRLSRSQRDTLTLIEDHFLKNKVDFVSLTEALDTSTPFGKAMIGILAVFAQLERETIAERMRLGHIKRAEEGLRGMGGDYDPAGYKRQDGRLVLVPEEAQHIQEAFNLYEQYLSITKVQKRLKELNYPVWRFRRYRDILSNKLYCGYVQFADKHYKGQHESIITEEQFDRVQILLSRHKGRNAFKAKEALLTGLAVCGECGESYVSYHCRAKGKHYRYYTCRARRFPSEYPEKCHNKNWRSEAIEKFIQDALYTIADEKETSEREFVAIDYGTQLKKIDQKLERLVDLYADGSIEKSVLDKQVTKLNNEKRDIAEQQAAQTERAARSVNRKQLQDYAIVLESAAFPDRQAIVQKLIRRLAIHKDRLEIEWNF

SEQ ID NO: 110 - protein, 504 aa, Artificial Sequence
  Synthetic
MRICMYLRKSRADEELEKTLGEGETLSKHRKALLKFAKEKNLNIVEIKEEIVSGESLFFRPKMLELLKEIENKQYSGVLVMDMQRLGRGNMQDQGIILETFKKSNTKIITPMKTYDLSNDFDEEYSEFEAFMSRKELKMINRRMQGGRVRSVEDGNYIATNAPYGYDIHWINKARTLKPNQKESEIVKLIFKLYIEGNGAGTIAKHLNSLGYKTKFENSFNNSSIIFILKNPVYIGKITWKKKDIRKSKDPNKIKDTRTRDKSEWIVVDGKHDPIIDQITWKQAQEILNNRYHIPYKLVNGPANPLAGLIICATCKSKMVMRKLRGTDRILCKNNKCNNISNRFDAVEKSVVESLENYLKAYKVNLPELNEISNLKLYEQQISTLKKELKILNEQRLKLFDFLERGIYDEDTFLKRSKNLDERIEITNESLSNLNQIIAKENKAIKKEDIIKFEKVLDSYKSTADIRLKNELMKTLIFKIEYTKNKKGNDFKIKVFPKLKPLNI

SEQ ID NO: 111 - protein, 467 aa, Artificial Sequence
  Synthetic
MKCVIYRRVSTDMQVEEGISLDMQKLRLEQYAKSQGWVVVNDYCDEGYSAKNTERPAFQKMIKDMKKKQFDIILVYRLDRFTRSVSDLHSILKIMDEYNVKFKSSTEIFDTTTATGRMFITLVATLAQWERETTAERVRDSMHKKAELGLRNGAKSPMGYDLNKGNLYINHTEAEIVKYIFEMFKTKGIISIVKSLNSRGVKTKRGKIFNYDAVRYIINNPIYIGKIRWGDDILTDIAQKDFETFIDKDTWYTVQQVQDSRKRGKVRLHNFFVFSNVLKCARCGKHFLGNKQVRSHNRIVMSYRCSSRHHKGTCDMPQVPEDVIEKEFLNLLEDAIVDLDDTEEKPIELSNLQEQYNRIQDKKARLKYLFIEGDIPKNEYKKDMLTLTQEENIIQKQLANITDTASSLEIKELLNQLKDEWYNLNNESKKAAVNAIVSSITVEVTKPARVGKNPIAPVIKVTDFKIK

SEQ ID NO: 112 - protein, 515 aa, Artificial Sequence
  Synthetic
MKTAIYLRKSRADLEAEARGEGETLAKHRSTLLKIAKEMNLNVLAVREEIVSGESLVKRPEMLALLEEIEDNKYDAVLCMDMDRLGRGGMKEQGIILETFKRSNTKIMTPRKTYDLNDEWDEEYSEFEAFMARKELKIITRRMQRGRVASVEAGNYLGTHAPFGYDIHRLNKRERTLTINSEEASVVRMIFDWYANEEMGANAIRSKLNDLGYKSKLGNEWNPYSILDILKNNVYIGKVTWQKRKEVKRPDAVKRSCARQDKSDWIIADGKHEPIISESLFEQVQDKLNSRYHVPYNTNGIKNPLAGIIKCGKCGYSMVQRYPKNRKEAMDCKHRGCENKSSYTELIEKRLLEALKEWYVNYKADFEKHKQDDKLKETQVIQMNEVALRKLEKELVDVQKQKNNLHDLLERGVYTVDMFLERSNVISDRINEITSTMEKLQNEIKTEIKKEKVKKDTIPQVEHVLDLYFKTDDPKKKNSLLKSVLEKAVYKKEKWQRLDDFELVLYPKLPQDGDI

SEQ ID NO: 113 - protein, 531 aa, Artificial Sequence
  Synthetic
MASHSSWEIHPDLAAALASGKTVEEWLDGRTPVVSYARISVDLQKVKAIGVARQHGMHCDPAAKEQGWAVVYRYTDNDLTAADPDVQRPAFLQMVRDLRARQTAEGIAIRGILAVEEERVVRLPEDYLKLYRALTVEEDAVLYYTDKRQLVDVYAEVEQTRGLMSSSMGETEVRKVKRRAKRSTKDRAAEGKYTGGARRFGWLGADKDLGRTQNEKLDPDESVWLRNMIDMKLCGKGWHTIAVWLISESIATVRGGEWTSTGVKSLLTNPAICGYRILNGELVLDPGTGEPKVGNWETIATPEEWHQICEMAWPGGKLAKTKKPKGTKRARKHLSTGILRCGWIPKSGPKEDMCLHSMVGRPPHGNHKWGNYVCNGTDCRKVSRRMDKIDRIVEGIVVRTLKDQFATLAPEEKTWHGQHTLERLTARRQELKAAYKAEHISMADYLEFIDPLDAQIKESQADRDAFYAEQAAKNFLAGFTEERWHDFDLEQKQTAIGTVLQAVIVHPLPEGRSRKAPFDPSLIEIVFKNPH

SEQ ID NO: 114 - protein, 514 aa, Artificial Sequence
  Synthetic
MAKELTKTASVAAYLRKSREDADQDDTLARHRKQLIDLVKQRGFENVDWYEEIGSADSIKNRPVFSDLLKKIENDEYDAVCVVAYDRLSRGNQIESGIISKAFKDTETLLITPTRTYDWSIEGDEMLSEFESMIARSEYRVIKKRLKQGKINAVKNGRLHSGNVPYGYKWDKNDKTAKIDKEKHEIYRLMVKWFLDEEYSATEIADKLNELGIPSPSGGSTWYSEVVADILTNDFHRGLVWYGKYRARKNGIGIEKNPDSSSIIMHKGNHEPMKSDEEHGAIIRRISKLRTFKPGRKLNKNTFKLSGLVRCPHCGKVQVVHTPKNRNPHVRKCLKKSKTRTTECNNTTGIPEEALYKAIVMKIREYNEVLFSKDSSEKKDEEARTYMNQILSLHEKAISKSNKRIEKIKEMYMDEIIDKDEFKSRIDKEKKSILEAENEIRTLKESADYHDEIEHEQRKIKWNHEKVQEFIESDQGFTPSEINLILKLIISHVSYTMVKNEYGEFDVDLRVNFN

SEQ ID NO: 115 - protein, 543 aa, Artificial Sequence
  Synthetic
MGKNGARVYSYLRFSDPRQATGSSADRQLAYASAWASKHGMELDATLTLRDEGLSAYHETHVKQGALGAFLRAVDEGRIPAGSVLIVEGLDRLSRAEPLLAQAQLGQIVNAGITVVTASDGREYNREGLKAEPMNLVYSLLVMIRAHEESDTKSKRVKAAVRRQCEAWVTGSYRGRIVSGKDPQWLAWDGDSWQFIPERVEAVRFALDAYRSGIGAARLVRLMHEKGMVLSDWGIAAQQVYRLVRLPALRGAKRISIDGEDFMLEDYYPRLLSDEEFSELETLVGQRYRRRGKDEIVGIVTGIGITRCGYCGTALVAQNLMQRVKADGSLEDGHRRLHCVSYSKNGGCNGGSCSSVPIERAVLAYCSDQMNLQRLLEPSSAGEDLRPRLVEAQKGVAEIERQLERVTDALLADDSGAAPLAFVRKARELEEDLERRRSAVQALEQELVAKSASAPAAGASKWAELAERAKSMADAEAREQARQLVMDTFETLVVYMRGVIPNPKGRYIDVMMKSRAGQTRWIRVDRRTGVWKEGADRPTTRRP

SEQ ID NO: 116 - protein, 505 aa, Artificial Sequence
  Synthetic
MSIAIYLRKSRADEEAEKQGEFETLSRHKSTLLKLAKEQNLDVIEIKEELVSGESIIHRPKMLELLKEVEENKYDAVLVMDLDRLGRGDMKDQGIILETFKESKTKIITPRKTYDLTDEFDEEYSEFEAFMARKELKLISRRMQRGRVKSVEEGNFIGTSAPFGYDAVTTGRKERILVPNKDADIVRTIFDLYINEDMGCSKISKYLNNLGIKTATGANWYNSAITNIIKNKVYCGYIQWQKKDYKKSKNPNKIKTVKLRPKDEWIEAKGKHEPLISEITWKKAQNILKKNGHVSYGNQIKNPLAGIVICKNCGRPLVYRPYADHDYIICYHPGCNKSSRFEFIEAAILKSLEDTVKKYQLKASDIDLDKNNKGSNIEFQKRVLKGLETELKELSKQKNKLYDLLERGIYDEDTFIERSNNISSRTEEIKDSIKTVKNKLNSVKKDNAKIIEDIKTVLSLYHDSDSLGKNKLLKSVIDKAIYYKSKEQKLDSFELMVHLKLHEDQ

SEQ ID NO: 117 - protein, 528 aa, Artificial Sequence
  Synthetic
MKVPVWCYARISTLKQIDGFGIQRQINTINQFLQYVVLDHRLPFTLDVDNVTQMVAEGKSAFRGKNWNEKTKLGQYRKMVMDGVINDSVLIVENIDRLTRLDTFQAVEIISGLVNRGTTILEIETGMTYSRYIPESITVLVMQCNRANGESKRKSIMMQKSHANRYGKVSKVRPRWFDVVEIDGIKQYRPNETAKAIQRMYNDYINGIGAAHIVRTYGNTDNGKAWTLVTVLRALSDKRVADDARYPPIIDKELYDSVQALKAATNKKGNTHQKNMLNIFSGMSRCPVCNQSIIVKRNSHGNLFTVCLGKRTNKTCEARSISYFALERPLLTAISGLDFSEVYKHEDKNVLTLRDQWIQNERDIAAFRERLNKASRHEKFAILDELEIMNREQEELTIRLKSVDVPKDIQLTFDDDKLDLDTNYRIELNNRIKKLIQHINIVREDVSKSSYTIYCTIKYWTDVISHLVIIDVNIKRTGTGGTNTLTTTLRSVSSLNMDGTVSGNPDSDAWEYWKSFLDGTIGLVDYKK

SEQ ID NO: 118 - protein, 471 aa, Artificial Sequence
  Synthetic
MRKVAIYSRVTTINQAEEGYSIQGQIEALTKYCEAMEWKIYKNYSDAGFSGGKLERPAITELIEDGKNNKFDTILVYKLDRLSRNVKDTLYLVKDVFTANNIHFVSLKENIDTSSAMGNLFLTLLSAIAEFEREQIKERMQFGVMNRAKSGKTTAWKTPPYGYRYNKDEKTLSVNELEAANVRQMFDMIISGCSIMSITNYARDNFVGNTWTHVKVKRILENETYKGLVKYREQTFSGDHQAIIDEKTYNKAQIALAHRTDTKTNTRPFQGKYMLSHIAKCGYCGAPLKVCTGRAKNDGTRRQTYVCVNKTESLARRSVNNYNNQKICNTGRYEKKHIEKYVIDVLYKLQHDKEYLKKIKKDDNIIDITPLKKEIEIIDKKINRLNDLYINDLIDLPKLKKDIEELNHLKDDYNKAIKLNYLDKKNEDSLGMLMDNLDIRKSSYDVQSRIVKQLIDRVEVTMDNIDIIFKF

SEQ ID NO: 119 - protein, 543 aa, Artificial Sequence
  Synthetic
MGKNGARVYSYLRFSDPRQATGSSADRQLAYASAWASKHGMELDATLTLRDEGLSAYHETHVKQGALGAFLRAVDEGRIPAGSVLIVEGLDRLSRAEPLLAQAQLGQIVNAGITVVTASDGREYNREGLKAEPMNLVYSLLVMIRAHEESDTKSKRVKAAVRRQCEAWVAGSYRGRIVSGKDPQWLAWDGDSWQFIPERVEAVRFALDAYRSGIGAARLVRLMHEKGMVLSDWGIAAQQVYRLVRLPALRGAKRISIDGEDFMLEDYYPRLLSDEEFSELETLVGQRYRRRGKDEIVGIVTGIGITRCGYCGTALVAQNLMQRVKADGSLEDGHRRLHCVSYSKNGGCNGGSCSSVPIERAVLAYCSDQMNLQRLLEPSSAGEDLRPRLVEAQKGVAEIERQLERVTDALLADDSGAAPLAFVRKARELEEDLERRRSAVRALEQELVAKSASAPAAGASKWAELAERAKSMADVAAREQARQLVMDTFETLVVYMRGVIPNPKGRYIDVMMKSRAGQTRWIRVDRRTGVWKEGADRPTTRRP

SEQ ID NO: 120 - protein, 541 aa, Artificial Sequence
  Synthetic
MQSPKVYSYFRFSDPRQAAGSSADRQLAYASAWASKHGMELDATLTLRDEGLSAYHETHVKQGALGAFLRAVDEGRIPAGSVLIVEGLDRLSRAEPLLAQAQLGQIVNAGITVVTASDGREYNREGLKAEPMNLVYSLLVMIRAHEESDTKSKRVKAAVRRQCEAWVAGSYRGRIVSGKDPQWLTWGGDSWQFIPERVEAVRFALDAYRSGIGAARLVRLMHEKGMVLSDWGIAAQQVYRLVRLPALRGAKRISIDGEDFMLEDYYPRLLSDEEFSELETLVGQRYRRRGKDEIVGIVTGIGITRCGYCGTALVAQNLMQRVKADGSLADGHRRLHCVSYSKNGGCNAGSCSSVPIEHAVLAYCSDQMNLQRLLEPSSADEELRPRLAEAQQRVAEVERQLQRVTDALVADDSGAAPLSFVRKARELEEELERRRSAVRVLERELVAMASSVPVAEASKWAELAEQAKSVSNVEAREQARQLVMDTFERIVVYMRGVVPEGRRSKYIDVLLVSRAGQSRWLRVGRRTGTWSAGGDWNGSAP

SEQ ID NO: 121 - protein, 452 aa, Artificial Sequence
  Synthetic
MKAAIYIRVSTQEQIENYSIQAQTEKLTALCLSKDWDVYDIFIDGGYSGSNMNRPALNEMLSKLHEIDAVVVYRLDRLSRSQRDTITLIEEYFLKNNVEFVSLSETLDTSSPFGRAMIGILSVFAQLERETIRDRMVMGKIKRIEAGLPLTTAKGRTFGYDVIDTKLYINEEEAKQLRLIYDIFEEEQSITFLQKRLKKLGFKVRTYNRYNNWLTNDLYCGYVSYKDKVHVKGIHEPIISEEQFYRVQEIFSRMGKNPNMNKESASLLNNLVVCSKCRLGFVHRRKDTVSRGKKYHYRYYSCKTYKHTHELEKCGNKIWRADKLEELIIDRVNNYSFASRNIDKEDELDSLNEKLKIEHAKKKRLFDLYINGSYEVSELDSMMNDIDAQINYYEARIEANEELKKNKKIQENLADLATVDFNSLEFREKQLYLKSLINKIYIDGEQVTIEWL

SEQ ID NO: 122 - protein, 413 aa, Artificial Sequence
  Synthetic
MSVKKIRVNRQKHRKRVCAYIRVSTTNGSQLDSLENQKQYFENLYSNRDDIDFMGVYQDRGISGSKDKRPDFQAMIEECRKGKIDVIHTKSIARFARNTVTVLEISRELKAIGVDIFFEEQNIHTLSSEGEVMLSVLASIAEDELRSMSGNQRWAFQKKFQRGELVINTKRFLGYDVDENGELIINPEEALIVRQIFALYLEGYGTHRIAKLLNEKGVATVTGAKWHDTTIRQMLSNEKYKGSVLLQKYFHDGVNGPKKLNQGELEQYLIEDNHEAIISKEDWQAVQDKLNSRRWQQGRNKTYKFTGLLKCQHCGSTLKRQVSYKKKIVWCCSKYIKEGKVACRGMRVPEVDIPNWEITSPITVLERDRNGEKYYSYSGQESEDQRSSSGQEENQGSRILSSVHRPRRTAIKL

SEQ ID NO: 123 - protein, 559 aa, Artificial Sequence
  Synthetic
MKTKLYSYIRFSSMRQNDGSSYERQIRMAREIAVKYDLELVNDYQDLGVSAFKGANSKTGALSRFLDAIGRSVPVGSWLFIENLDRLSRADIVSAQELFLSIIRRGITIVTGMDNKIYSLDTVTANPMDLMFSILLFIRGNEESQTKRNRTNSSALIKIKAHQENPQNPAVAIEEIGKNMWWTDTTSGYVLPHPVFFPIVQEVVELRRNGRSTAEILDHLNATYTPPPAASHKRHSNWSRAMIERLFHTRALIGIKEISVDGVKYELKDYYPRVLDDAEFYHLKKSIGVRACNFGDKEEAKPIPLLSGVGLLKCEHCGSAMVKVKGTNRRPNQYRYSCDAMRSSRIECVHTNWSFRGDQLEKAVLQLLADKIWIAEDKANPVPALKVQIDEISRKIDNLITLSAMTGATKELADQITTLNSERETLYNQLKMAEEEMYSVDSQGWEKLAEFDLEDVYNEDRIKVRFKIKQALKRIGCSRIDKYKNLFVLEYIDGKTQRVVIENSRGPRKGRIFVDLKTINDRQILESNGLVLHPCLDMLTDKNWKPEEEIPGPLQEFGI

SEQ ID NO: 124 - protein, 413 aa, Artificial Sequence
  Synthetic
MSVKKIRVNRQKHRKRVCAYIRVSTTNGSQLDSLENQKQYFENLYSNRDDIDFIGVYHDRGISGSKDNRPNFQAMIEDCRRGKIDVIHTKSIARFARNTVTVLEISRELKAIGVDIFFEEQNIHTLSSEGEVMLSVLASIAEDELRSMSGNQRWAFQKKFQRGELVINTKRFLGYDVDENGELIINPEEALIVRQIFALYLEGYGTHRIAKLLNEKGVATVTGAKWHDTTIRQMLSNEKYNGSVLLQKYFHDGVNGPKKLNQGELEQYFIEDNHEPIISMEDWQTVQEKLNSRRWQQGRNKTYKFTGLLKCQHCGSTLKRQVSYKKKIVWCCSKYIKEGKAACQGMRVPEVDISNWTVTSPVKVIERDRDGEKYYSYSCQESAEQRSTSGQKENQCSRILPSVHRSRRTAIKL

SEQ ID NO: 125 - protein, 470 aa, Artificial Sequence
  Synthetic
MKGESKLDKKAAIYIRVSTQEQATEGYSIQAQTDRLTKYVEAKDFILYKKYIDAGYSASKLERPAMQELIQDVQSKKVDVVIVYKLDRLSRSQKDTMYLIEDIFRPNDVELISMQESFDTSTAFGSATVGMLSVFAQLERKSISERMITGRVERAKKGFYHTGGQDRPPAGYQFNSDNQLIINEYEAAAIKDLFRLYNDGLGKSSISEYLKKNYPGKNKWLPSSIDRMLKNSLYIGKVKFSGAEYDGIHEPIIDEVTFYKTQKEIARRKQTNTKRYNYVALLGGLCECGICGAKMANRRAVGRKGKVYRYYRCYSKKGSPKHMMKTDGCSSKAQQQFIIDEAVINNLKNIDVEAELKRRSAPQTNTSLISSQIESIDKQINKLIDLFQVDSMPLDVISEKIDKLNKEKQSMEKLLERKNKLDKTELQHRFDVLKSFDWDNSSIESKRVVIEMLVQKVIIHDNSIEIILVE

SEQ ID NO: 126 - protein, 454 aa, Artificial Sequence
  Synthetic
MKRVALYIRVSTEEQVLHGDSIRTQTEALEQYSKDNNFIIVDKYIDEGYSATNLKRPNLKRMIEDVKNNKIDLVMITKIDRLSRGVKNYYKIMETLEKHKCDWKTILEDYDSSTAAGRLHINIMLSVAENEAAQTSERIKFVFQDKLKRGEVITGSVPFGYKIKDKHLVIKEDEASIVREAFDAYQDFSSLAKTIQHINTKFSTKYMFKWMPKMLKNKIYIGIYEKGDLVVENYCEPIISREQFNFVQTLLKKNIRFSENKFKMNYLFSGMIVCGSCGRKMGGVHSRGGANRHYLYYRCPLSFATKLCDNKPYLNEKKVEAFLLENVKKELQKTILEHESNNKKRQKKNNNKNLRNKLEKQIEKLQDLYFDDLINKDTYKFKYKKLNDDLSELNKAENEAESVEKDLKSMKIFLDTNFEDNYYDMNYSEKRTLWTSAIDRIEVQKNGELVIKFL

SEQ ID NO: 127 - protein, 522 aa, Artificial Sequence
  Synthetic
MRKVTRIDGNNALQAFKPKVRVAAYCRVSTDSDEQMASLEAQKDHYESYIKANPDWEFAGIYYDEGISGTKKENRTGLLRLLADCENKKIDFIITKSVSRFARNTTDCIEMVRKLTDLGVFIYFEKENINTQRMEGELVLTILSSLAENESLSIAENSKWSIRRRFQNGTYKISYPPYGYDYVDGKLFINKEQAEIIKRIFSEALVGKGTQKIADGLNLDKIPTKRGSHWTATTIRGILSNEKYTGDVLLQKTYTDENFKRHYNRGEKDQYMIKDHHEAIISHEEFEAVKEILKQRGKEKGVIKGSSKYQNRYPFSGKIKCAECGSSFKRRIHGSGNHKYIAWCCTKHIKDASACSMKFVREDGIHQAFVVMMNKLIFGHKFILRPLLQSLKKTNYSDNITKIQELETKIKENTERVQVIMGLMAKGYLEPALFNTQKNELSKEAALLKEQKEAINRAINGSQTILVEVEKLLKFATKAEKQIDAFDSKIFEDFIEEIIVFSQEEISFKMKCGLNLRERLVK

SEQ ID NO: 128 - protein, 550 aa, Artificial Sequence
  Synthetic
MDTKVAIYVRVSTHHQIDKDSLPLQKQDLINYANYVLNTNNYEIFEDAGYSAKNTDRPGFQNMMSRIRNNEFTHLLVWKIDRISRNLLDFCDMYNELKKINVTFVSKNEQFDTSSAMGEAMLKIILVFAELERKLTGERVTAVMLDRATKGLWNGAPIPLGYIWDKIKKFPVIDDAEKNTIELIYNTYLKVKSTTAIRSLLNANNIKTKRNGTWTTKTISDIIRNPFYKGTYRYNYREPGRGKVKSENEWVVIEDNHKGIISKELWRKCNAIMDENAKRNNAAGFRANGKVHVFAGLLECGECHNNLYSKQDKPNLDGFIPSVYVCSGRYNHLGCNQKTISDNYVGTFIFNFISNILKTQNKIKKLDSKLLEKALLNGNVFKDIIGIENIEDLQNKSYASNVLKNKKNANEDNSFGLEVNKKEKAKYERALERLEDLYLFDDNAMSEKDYIIRKKKIAEKLNEVNEKLKELNTFADEQEINLLSKISSFTLSKELLNAYNIHYKELILNIGRNQLKDFANTIIDKIIIKDKKILNIKFKNNLKISFVHRG

SEQ ID NO: 129 - protein, 452 aa, Artificial Sequence
  Synthetic
MKAAIYIRVSTQEQVENYSIQAQTEKLTALCRSKDWDVYDIFIDGGYSGSNMNRPALNEMLSKLHEIDAVVVYRLDRLSRSQRDTITLIEEYFLKNNVEFVSLSETLDTSSPFGRAMIGILSVFAQLERETIRDRMVMGKIKRIEAGLPLTTAKGRTFGYDVIDTKLYINEEEAKQLRLIYDIFEEEQSITFLQKRLKKLGFKVRTYNRYNNWLTNDLYCGYVSYKDKVHVKGIHEPIISEEQFYRVQEIFARMGKNPNMNRDSASLLNNLVVCSKCGLGFVHRRKDTMSRGKKYHYRYYSCKTYKHTHELEKCGNKIWRADKLEELIIDRVNNYSFASRNVDKEDELDSLNEKLKTEHTKKKRLFDLYISGSYEVSELDAMMSDIDAQINYYEAQIEANEELKKNKKIQENLADLATVDFDSLEFREKQLYLKSLINKIYIDGEQVTIEWL

SEQ ID NO: 130 - protein, 452 aa, Artificial Sequence
  Synthetic
MKAAIYIRVSTQEQVENYSIQAQTEKLTALCRSKDWDVYDTFIDGGYSGSNMNRPALNEMLSKLHEIDAVVVYRLDRLSRSQKDTITLIEEYFLKNNVEFVSLSETLDTSSPFGRAMIGILSVFAQLERETIRDRMVMGKIKRIEAGLPLTTAKGRTFGYDVIDTKLYINEEEAKQLQMIYDIFEEEKSITTLQKRLKKLGFKVKSYSSYNNWLTNDLYCGYVSYADKVHTNGVHEPIISEEQFYRVQEIFSRMGKNPNMNRDSASLLNNLVVCGKCGLGYVHRRKDTVSRGKKYHYRYYSCKTYKHTHELEKCGNKIWRADKLEELIIDRVNNYSFASRNVDKEDELDSLNEKLKTEHAKKKRLFDLYISGSYEVSELDGMMADIDAQINYYEAQIEANEELKKNKKIQENLADLATVDFDSLEFREKQLYLKSLINKIYIDGEQVTIEWL

SEQ ID NO: 131 - protein, 452 aa, Artificial Sequence
  Synthetic
MKAAIYIRVSTQEQIENYSIQAQTEKLTALCRSKDWDVYDIFIDGGYSGSNMNRPALNEMLSKLHEIDAVVVYRLDRLSRSQRDTITLIEEYFLKNNVEFVSLSETLDTSSPFGRAMIGILSVFAQLERETIRDRMVMGKIKRIEAGLPLTTAKGRTFGYDVIDTKLYINEEEAKQLQMIYDIFEEEKSITTLQKRLKKLGFKVKSYSSYNNWLTNDLYCGYVSYADKVHTNGVHEPIISEEQFYRVQEIFSRMGKNPNMNRDSASLLNNLVVCGKCGLGYVHRRKDTVSRGKKYHYRYYSCKTYKHTHELEKCGNKIWRADKLEELIIDRVNNYSFASRNVDKEDELDSLNEKLKTEHAKKKRLFDLYISGSYEVSELDGMMADIDAQINYYEAQIEANEELKKNKKIQENLADLATVDFDSLEFREKQLYLKSLINKIYIDGEQVTIEWL

SEQ ID NO: 132 - protein, 543 aa, Artificial Sequence
  Synthetic
MGKNGARVYSYLRFSDPRQATGSSADRQLAYASAWASKHGMELDATLTLRDEGLSAYHETHVKQGALGAFLRAVDEGRIPAGSVLIVEGLDRLSRAEPLLAQAQLGQIVNAGITVVTASDGREYNREGLKAEPMNLVYSLLVMIRAHEESDTKSKRVKAAVRRQCEGWVTGSYRGRIVSGKDPQWLAWDGDSWQFIPERVEAVRFALDAYRSGIGAARLVRLMHEKGMVLSDWGIAAQQVYRLVRLPALRGAKRISIDGEDFMLEDYYPRLLSDEEFSELETLVGQRYRRRGKDEIVGIVTGIGITRCGYCGTALVAQNLMQRVKSDGSLEDGHRRLHCVSYSKNGGCNGGSCSSVPIERAVLAYCSDQMNLQRLLEPSSAGEDLRPRLVEAKKGVAEIERQLERVTDALLADDTGAAPMAFVRKARELEEDLERRRSAVRALEQELVTKSASTPAAGASKWAELAERAKSMTDVEAREQARQLVMDTFETLVVYMRGVMPTPKGRYIDLMMRSRAGQTRWLRVDRRSGVWRESGDSSRRLEG

SEQ ID NO: 133 - protein, 463 aa, Artificial Sequence
  Synthetic
MKVAIYTRVSSAEQANEGYSIHEQKRKLISFCEVNDWNRYEVFSDPGVSGGSMKRPSLQKLFDRLEEFDLVLVYKLDRLTRNVRDLLEMLEVFEKNNIAFKSATEVFDTNSAIGKLFITMVGAMAEWERETIRERSLMGSHAAIRSGKYIRARPFCYDLIDDKLKPNQHAKYIRFMVDKLMIGKSASEVVRQLESKKKPPGITKWNRKMILNWIKNPVMRGHTKFGDLLIENTHEPIISEDEYLKLIDIIEKRTYKTKSKHKAIFRGVLECPRCQSKLHLSRSIKKYDNGKTREVRRYSCDKCHRDNTVKNISFNESEIERQFINTLLKKGTDNFKISVPKKKSYDIEDNKVKINEQRANYTRSWSLGYIKDEEYFMLMDETENLLKDIEEKAKSHTDEKLNEEQIRTVKNLLIKGFKIATLEDKEDLITSSVDVIKFEFIPKEFNKNKTLNTVKINEIQFKF

SEQ ID NO: 134 - protein, 463 aa, Artificial Sequence
  Synthetic
MKVAIYTRVSSAEQANEGYSIHEQKRKLISFCEVNDWNRYEVFSDPGVSGGSMKRPSLQKLFDRLEEFDLVLVYKLDRLTRNVRDLLEMLEVFEKNNIAFKSATELFDTTSAIGKLFITMVGAMAEWERETIRERSLIGARAAVRSGKYIKVQPFCYDLVDQKLKPNQYAEYIRFIVDKLLSGKSANEVVRLLESKKKPPGITKWNRKTVLGWMRNPILRGHTKHGDLLIKNTHEPIISEDEHSKMLDIIDKRTHKSKTKHNSIFRGVIECPQCQNKLYLFSSIQKRANGGSYEVRRYTCATCHKNKEVKDVSFNESEIEREFINTLLKKGTDNFMVNIPKPKDYDIENNKEKILEQRTNYTRAWSLGYIKDEEYFVLMDETDKLLKDIEEKESPRINIELNEQQIRTVKNLLIKGFKMATAENKEELITSTVDLIKIDFIPRRLNKESNINTVKINEIHFKY

SEQ ID NO: 135 - protein, 523 aa, Artificial Sequence
  Synthetic
MAKVTTIPATISRFTATPINEKKKRRTAAYARVSTDSEEQLTSYSAQVDYYTNYIKSRDDWEFVSVYTDEGITGTNTKHREGFKRMVADALAGKIDLIVTKSVSRFARNTVDSLTTVRQLKEKGVEIYFEKENIWTLDSKGELLITIMSSLAQEESRSISENCTWGQRKRFADGKVTVPFKRFLGYDRGPDGNLVLNKDEAVIIRRIYSMFLQGMTPHGIAARLTADGIKSPGGKDKWNAGAVRSILTNEKYKGDALLQKSYTVDFLTKKKKVNEGEIPQYYVEGNHEAIIQPEVFELVQQELERRKSSRGRHSGVHLFSGKIRCGQCGEWYGSKVWHSNSKYRRVIWQCNHKYDGEEKCSTPHLTEDEIKAMFVSAANKLIGKKAAIISPLRNSLDVAFDTSALETEVAELQDEIMVVSDLIEKCIYENAHVALDQTEYQKRYDGLTTRFDTAKARLEEIEAALADKKSRRAAIDAFLDTLAQADPMEKFDPALWCGLIDYVTVYARDDVRFAFKDGQEIKA

SEQ ID NO: 136 - protein, 543 aa, Artificial Sequence
  Synthetic
MGKNGARVYSYLRFSDPRQATGSSADRQLAYASAWASKHGMELDATLTLRDEGLSAYHETHVKQGALGAFLRAVDEGRIPAGSVLIVEGLDRLSRAEPLLAQAQLGQIVNAGITVVTASDGREYNREGLKAEPMNLVYSLLVMIRAHEESDTKSKRVKAAVRRQCEGWVTGSYRGRIVSGKDPQWLAWDGDSWQFIPERVEAVRFALDAYRSGIGAARLVRLMHEKGMVLSDWGIAAQQVYRLVRLPALRGAKRISIDGEDFMLEDYYPRLLSDEEFSELETLVGQRYRRRGKDEIVGIVTGIGITRCGYCGTALVAQNLMQRVKSDGSLEDGHRRLHCVSYSKNGGCNGGSCSSVPIERAVLAYCSDQMNLQRLLEPTSAGEDLRPRLVEAQKGVAEIERQLERVTDALLADDSGAAPLAFVRKARELEEDLERRRSAVQALEQELVAKSASAPAAGASKWAELAERAKSMADVDAREQARQLVMDTFETLVVYMRGVIPNPKGRYIDVMMKSRAGQTRWIRVDRRTGVWKEGADRPTTRRP

SEQ ID NO: 137 - protein, 462 aa, Artificial Sequence
  Synthetic
MTVGIYIRVSTEEQAREGFSISAQREKLKAYCISQDWQDYKFYVDEGKSAKDTNRPYLKLMLDHIQQGLINVVLVYRLDRLTRSVKDLYKLLDLFDKNNCIFRSATEVYDTGSATGRLFITLVAAMAQWERENLGERVTMGQVEKARQGQYSAPAPFGFKKQDETLVKDKKQGYILMDMIDKVKKGWSIRQIAKYLDQSYLPIRGYKWHIATILSILHNPALYGALRWKDELNETSHEGYLTKEEFEELQNILYSRQNFRKRQIESAHIFQMKLVCPQCGNRLGCERSVYFRKKDQKNVESLHYRCQSCALNERPSISVSEKKLEKALLLFMKNVKFDLEPVVKEEKNETTEIQNAIVKIERQREKFQKAWASDLMTDEEFTARMSETRKAHENFTKRLSEIQRATPLPIDIKKAKKLVNEFKINWAYLNTEEKREFVQSFIEKIEFTKKDQNPHILNVSFY

SEQ ID NO: 138 - protein, 553 aa, Artificial Sequence
  Synthetic
MSTITKIQSYQRDVKQLRVAAYCRVSTNNIEQLESLENQREHYQKYISNQPNWQLAKIYYDEGISGTKLTKRDALKELLTDCHNHQIDLVITKSISRLSRNTTDCLRIVRELQQLNIPIIFEKEHINTGEMASELFLSIFSSLAQDESHSTAGNLRWAIRQRFASGKFHVSSAPYGYSIKDGNLVINHTEAKTVRQVFQRFLSGISASQIAKKLNQKQVPTKRGGQWRSNTVINILRNINYTGGMLCQKTYRDDQYHRHFNQGEITQYLIEDHHPSLINHRSYHRAQVLIKEAAQKHHIEVGSHKYQQHYLFSGKITCGYCGTVFKRQTRPHKICWACQQHLKSAQQCPVKAVSEKSLEAAFCNMINELVYSEKFLLRPLLEGLKEEANANSDGQLISLTKQIKTNDHKAETLTELMHASLLDKAIYVNQTAKLEQDTYQCREKIKQLNGQNTDSANNFEDVRALLRWCQQGQMLTEFDGTLFQEFVRQVVVNSSNEATFNLKCGLSLPEKLNKNATIDGHFYRDIIKQRYNDPIKQTEYLYSIIESEGDLIG

SEQ ID NO: 139 - protein, 525 aa, Artificial Sequence
  Synthetic
MGKVRIIPAHQQKGNSVQPQQSRQPFEQLRVAAYCRVSTDYDEQASSYETQVVHYKELIQKEPTWEFAGIYADDGISGTNTKKREQFNQMIAACKAGKIDLIVTKSISRFARNTIDCLKYIRDLKAINVAIFFEKENINTMDAKGEVLITIMASLAQQESESLSQNVKMGIQYRYQQGKIFVNHNHFLGYTKDAQGNLVIEPAEAKIIKRIFYSYLNGMSMKQIADSLKADGILTGGKTKNWQSSGVSRILKNEKYMGDALLQKTYTVDFLNKKRVKNNGIMPQYYVENDHPAIIPKPVFMQVQQLIKQRQNGITTKNGKHRRLNGKYCFSQRVFCGKCGDIFQRNMWYWPEKVAVWRCASRIKRSKSGRRCMIRNVKEPLLKEATVQAFNQLIEGHKLADKQIKANIMKVIKNSKGPTLDQLDKQLEEVQMKLIQAANQHQDCDALTQQIMDLRKQKEKVQSRETDQQAKLHNLDEINKLVELHKYGLVDFDEQLVRRLVEKITIFQRYMEFTFKDGEVIRVNM

SEQ ID NO: 140 - protein, 539 aa, Artificial Sequence
  Synthetic
MTTPLRGLSVLRLSVLTDETTSPERQRTANHDAGAALGIDFSDREAVDLGVSASKTTPFERPELGAWLKRPDDFDALVFWRFDRAVRSMDDMHELSKWARDHRKMIVIAEGPGGRLVLDFRNPLDPMAQLMVTLFAFAAQFEAQSIRERVLGAQAAMRTMPLRWRGSKPPYGYMPAPLESGGMTLVQDEKAVVVIERAIKELKNGKTLSAICHELNEAGIPSPRDHWSLVQGRKKGGGVGNSVGERIKKESFKWRHGALKKLLTSESLLGWKMTRSGPVRDDEGAPVMATREPILTREEFDAVGALIIEANEDGTKWERRDSTALLLRVILCDGCGQHMFVGNPSANSKGISAVYKCGAWGRGEKCPEPASVKLEWAEDYVRERFLRSVGGMRLTETRRIPGYDPQPEIDATTAEYEAHMREQGQQKSKAAQAAWKRRADALDARLAELESREARPARVEIVQLGMTIADAWRDADDKERRDMLREAGVTVRIKRAKRGRTFKLNEDRVKWHMANEFFAQGAEELEAIARDEEHANGSQ

SEQ ID NO: 141 - protein, 531 aa, Artificial Sequence
  Synthetic
MASHSSWEIHPDLAAALASGKTVEEWLDGRTPVVSYARISVDLQKVKAIGVARQHGMHCDPAAKEQGSAVVYRYTDNDLTAADPDVQRPAFLQMVRDLRARQTAEGIAIRGILAVEEERVVRLPEDYLKLYRALTVEEDAVLYYTDKRQLVDVYAEVEQTRGLMSSSMGETEVRKVKRRAKRSTKDRAAEGKYTGGARRFGWLGADKDLGRTQNEKLDPNESVWLRNMIDMKLCGKGWHTIAVWLISESIATVRGGEWTSTGVKSLLTNPAICGYRILNGELVLDPGTGEPKVGNWETIATPEEWHQICEMAWPGGKLAKTKKPKGKKRARKHLSTGILRCGWIPKSDPKEDMCLHSMVGRPPHGNHKWGNYVCNGTDCRKVSRRMDKIDRIVEGIVVRTLKDQFATLAPEEKTWHGQYTLERLTARRQELKAAYKAEHISMADYLEFIDPLDAQIKESQADRDAFYAEQAAKNFLAGFTEERWHDFDLEQKQTAIGTVLQAVIVHPLPEGRSRKAPFDPSLIEIVFKNPH

SEQ ID NO: 142 - protein, 452 aa, Artificial Sequence
  Synthetic
MKAAIYIRVSTQEQIENYSIQAQTEKLTALCRSKDWDVYDTFIDGGYSGSNMNRPALNEMLSKLHEIDAVVVYRLDRLSRSQRDTITLIEEYFLKNNVEFVSLSETLDTSSPFGRAMIGILSVFAQLERETIRDRMVMGKIKRVESGLPLTTAKGRTYGYDVVDTKLYINEEEAQHLQLIYDIFEEEKSITFLQKRLKKLGFKVKSYSSYNKWLMNDLYIGYVSYSDKVHAKGIHEPIISEDQFYRVKEIFSRMGKNPNMNKESSSLLNNLIVCEKCGLGYVHRAKDTVSRGKKYHYRYYSCKTYKHTHELEKCGNKIWRADKLEEIIISRVKNYSFATRNLDKEDELDSITEKLKTEHSKKKRLFDLYINGSYEVAELDKMMADIDAQINYYDSQIEANKELKRNKKVQESLAELATVDFDSLEFREKQIYLKSIINKIYIDGEQVTIEWI

SEQ ID NO: 143 - protein, 502 aa, Artificial Sequence
  Synthetic
MIQAFSYVRFSTKSQATGTSLERQLNASKLFCQQHNLELSSKGYNDLGISGFKNVKRPELDQMLEAIQSGVIPSGSYILIEAIDRLSRKGISHTQDVLKSILLHDIKVAFVGEDAKTLAGQILNKNSLNDLSSVILVALAADLAHKESLRKSKLIKAAKAIIREKAQQGKKIRGHTMFWIDWSESNNKFVLNDKKSIIKEIVKLRLAGNGPRKIATVLNEQQIPSPSGKQWNHMTVKVALRSPTLYGAYQTHQIIEGKAVPDILIKDHYPAITNYETYLQLQSDSSKANKGKPSKANPFSGILKCSCGHGMNFSKKVMVYKDKPHEYEYHFCSASTEGRCPNKKRIRDLVPLLTSLMDKLTIKQTTKKNLNLEEIKLKEQKIEKLNLMLLEMDNPPLSVLKTIQKLEEELNLLLKTTDSPDVSQNDVESLSSINDAQEYNMHLKRIVRKIEVHQLDTTGKNLRIKVLKTDGHSQNFLIKSGEVLFKSDTEQMKNLLKTMKEA

SEQ ID NO: 144 - protein, 487 aa, Artificial Sequence
  Synthetic
MAYAVYVRVSSDKDEQVSSVENQIDICRYWLENNGFEWDKNAVYFDDGISGTAWLERHAMQLILAKARKKELDTVVFKSIHRLARDLKDALEIKEILLGHGVRLITIEEGYDSHYEGKNDMKFEMYAMFASQLPKTLSVSVTAALAAKVRRGGYTGGFVPYGYEIVDDKYAINEEEAELVREIFELYAQGFGYIKISNIINDQGKRTRKGAPWTYSTLCKMIKNPTYKGDYTMQKYGTVKVNGKKKKVINPEEKWVVFENHHPAIVSRELWDKVNNKDPNKFQKKRRISTTNELRGITFCAHCGTAMSKRNNVRVNKNGTVKEYSYMICDWSRVTARRECVKHVPIHYKDLRALVLSKLKEKESVLDKEFYSDEDQLDVKLKKLNRDIKDLKFKRERLLDLYLEDERIDKDTFTIRDAKLEKEIELKELEMRKANNIELQMKERQEIRDAFALLEESKDLNSAFKKLIKRIEVAQDGAVDIHYRFAE

SEQ ID NO: 145 - protein, 543 aa, Artificial Sequence
  Synthetic
MGKNGARVYSYLRFSDPRQATGSSADRQLAYASAWASKHGMELDATLTLRDEGLSAYHETHVKQGALGAFLRAVDEGRIPAGSVLIVEGLDRLSRAEPLLAQAQLGQIVNAGITVVTASDGREYNREGLKAEPMNLVYSLLVMIRAHEESDTKSKRVKAAVRRQCEAWVAGSYRGRIVSGKDPQWLAWDGDSWQFIPERVEAVRFALDAYRSGIGAARLVRLMHEKGMVLSDWGIAAQQVYRLVRLPALRGAKRISIDGEDFMLEDYYPRLLSDEEFSELETLVGQRYRRRGKDEIVGIVTGIGITRCGYCGTALVAQNLMQRVKADGSLEDGHRRLHCVSYSKNGGCNGGSCSSVPIERAVLAYCSDQMNLQRLLEPSSAGEDLRPRLVEAQKGVAEIERQLERVTDALLADDSGAAPLAFVRKARELEEDLERRRSAVRALEQELVAKSASAPAAGASKWAELAERAKSMADVDAREQARQLVMDTFETLVVYMRGVIPNPKGRYIDVMMKSRAGQTRWIRVDRRTGVWKEGADRPTTRRP

SEQ ID NO: 146 - protein, 596 aa, Artificial Sequence
  Synthetic
MRSESTSAFGQPNDINPILLLSDTATPGSMAIKAKVYSYLRFSDPKQAAGSSADRQMEYARRWAAEHGMTLDSELSMQDAGLSAYHQRHVTRGALGLFLQAIDDARIPAGSVLVVEGLDRLSRAEPIQAQAQLAQIINAGITVVTASDGREYNREGLKAQPMDLVYSLLVMIRAHEESDTKSKRVRAAIHRQCQGWMAGTWHGLVRNGKDPHWLRLVGQAYEIVPERGEAVRTAVSMFRQGHGAVRIMRSLADSGLQITNGGNPSQQLYRIVRNRALIGEKVLAVDGQEYRLAGYYPPLLSPAEFADLQHLTAQRSRHKGTGEIPGLITGMRIAFCGYCGAAMVSQNLMNRGRQEDGRPQNGHRRLICVSNSQGGGCPVAGSCSVVPIEHALLTFCADQMNLSRLLDFGNRANGIAGQLSIARVQVSDTTARIDKITDALLASDAGQAPAAFLRRARELESELAEQQKRVEALEHELAAVALSPEPAAAKAWAGLVEGVEALDHDARIKARQLVADTFDRIVVFHRGRTPEHSRSWKGTIDLLLMAKRGGARLLHIDRQTGGWKAGEEIDTIQIPLPPGVAEATSQSEALPGLVSR

SEQ ID NO: 147 - protein, 454 aa, Artificial Sequence
  Synthetic
MKCAIYRRVSTDEQAEKGFSLENQLLRLQAFADSQGWEIVADYMDDGYSGKNTDRPALKKMFAEIDNFDVILVYKLDRFTRSVRDLNDMLETIKGHDIAFKSVTEAIDTTTATGRMILNMMGTTAQWEREMISERIKDVLGKLAEQGIFPKGKPTYGYKIKNGVISIDEKEAEVVKLIFEKSKTLGQHAVSKYLRDNGIYTPSGSTWMSGGIGRIIRNPFYYGEMKVNGKLIAIKNEGYKPLISKEEFDLVNRISKSRNIKNPKRKSDIIYPFSGIALCPRCNKPLRGDRSKVGGKYYTYYRCINTREGRCTMKRIRTQVIDNAFSEYVAGAFNEANIQIDNKDERNALERKIEALKSKIDRLKELYIDGDITKVRYKEQTEAINSEINSTQDKMLSLDDGKITEKAIEKAKELDKVWLLLDDKTKDESLRSVFDTITLEETERGIIITGHSFL

SEQ ID NO: 148 - protein, 477 aa, Artificial Sequence
  Synthetic
MMDRNKVAIYVRVSTQGQVDDGYSLDEQVDLLTNYCKLKEWTLYDVYVDPGISGKNMHRPEIERLTRDAKRKLFDIVLIYDLKRLGRSQKENIVLVEDVFNPNGIRLVSFTENFDASTPVGKMVFGMLSAYAELDRANIAERMMMGKIGRAKAGKAMSWGMPPFAYDYNKETGDLELDEVKAPIVEMIYSEFLKGASVNKIVQKLNSMSYHGKNHEWKHHAVTVIIDNPVYCGMMKYMGQTYQAKHTPIIDKKTFELAQLERKKRLSKYHDADWLGPFQRKYIGSKICYCGLCGAHLKSEKDKKNKLTGIRSISFFCPNTRSRGTGECTNPRFKQSVLEGYILNEVAKLQQNPEKLKDIKPAEDNELHNKIATYEKKIKQNSSKLSKLNDLYLNDLISLDDLKQQSKSLLNENEFMEEQIKLLSATTREDELRKKIDTFLAFPDILTADYDTQKQAVELVISRVEATKEGIDIFFNF

SEQ ID NO: 149 - protein, 455 aa, Artificial Sequence
  Synthetic
MKAVVTKKRCAVYTRVSTDERLDQSFNSLDAQREAGQAYIVSQRAEGWLPVGDDYDDGGYSGGNMERPALKRLLADIVADQIDIVVVYKIDRLTRSLTDFAKLVEVFERHKVSFVSVTQQFNTTTSMGRLMLNILLSFAQFEREVTGERIRDKIAASKRKGLWMGGYTPLGYEIKDRKLVIEEKDAEIIRRIFTRFTELRSITDVVRELALEGLTTKPNRLKDGRVRNGTPMDKKYISKLLRNPIYVGEIRHKGTVFAGQHEPIITRQLWDRVQGILAEDAYERMGKTQTRHKTDALLRGLMYGPDGGKYHITYSKKPSGKKYRYYIPKADSRYGYRSSATGMIPADQIEEVVVNLLVGALQSPESIQGVWNTVRDKYPEIDEPTTVLAMRRLGEVWKQLFPAEQVRLVNLLIERVQLLSDGVDIVWRESGWRELAGELQADSIGGELLEMEMTP

SEQ ID NO: 150 - protein, 520 aa, Artificial Sequence
  Synthetic
MKKITKIEGNQDYIFKPKTRVVAYCRVSTDSDEQLVSLQAQKAHYETYIKANPEWEYAGLYYDEGISGTKKENRSGLLRMLSDCETRSIDLIITKSISRFARNTTDCLEMVRKLMDLGVHIYFEKENINTGSMESELMLSILSGLAESESISISENTKWAIQRRFQNGTFKISYPPYGYQNIDGRMIVNPKQAEIVKYIFAEVLSGKGTQKIADDLNRKGIPSKRGGRWTATTIRGILTNEKYTGDVILQKTYTDSRFNRHTNYGEKNMYLVENHHEAIISHEDFEAVEAILNQRAKEKGIEKRNSKYLNRYSFSGKIICSECGSTFKRRIHSSGRREYIAWCCSKHISHITECSMQFIRDEDIKTAFVTMMNKLIFGHKFILRPLLNGLRSQNNAESFRRIEELETKIENNMEQSQMLTGLMAKGYLEPAMFNKEKNSLEAERESLFAEKEQLTHSVNGIFTKVEEVDRLLKFTTKSKMLTAYEDELFKNYVEKIIVFSREVVGFVLKCGITLKERLVN

SEQ ID NO: 151 - protein, 452 aa, Artificial Sequence
  Synthetic
MKAAIYIRVSTQEQIENYSIQAQTEKLTALCRSKDWDVYDIFIDGGYSGSNMNRPALNEMLSKLHEIDAVVVYRLDRLSRSQRDTITLIEEYFLKNNVEFVSLSETLDTSSPFGRAMIGILSVFAQLERETIRDRMVMGKIKRIEAGLPLTTAKGRTFGYDVIDTKLYINEEEAKQLQMIYDIFEEEKSITTLQKRLKKLGFKVKSYSSYNNWLTNDLYCGYVSYADKVHTKGVHEPIISEEQFYRVQEIFSRMGKNPNMNRDSASLLNNLVVCGKCGLGYVHRRKDTVSRGKKYHYRYYSCKTYKHTHELEKCGNKIWRADKLEELIIDRVNNYSFASRNVDKEDELDSLNEKLKTEHTKKKRLFDLYISGSYEVSELDAMMSDIDAQINYYEAQIEANEELKKNKKIQENLADLATVDFDSLEFREKQLYLKSLINKIYIDGEQVTIEWL

SEQ ID NO: 152 - protein, 474 aa, Artificial Sequence
  Synthetic
MSLMDENTQKNVGIYVRVSTEEQAKEGYSISAQKEKLKAYCISQGWNSYKFYIDEGKSAKDIHRPSLELMLRHIEQGIIDTVLVYRLDRLTRSVRDLYSLLDYFDKYQAVFRSATEVYDTGSATGRLFITLVAAMAQWERENLGERVKMGQVEKARQGQFSAPAPFGFTKEGESLVKNPEEGEVLLDMIDKIKKGYSLRELADYLDESDAIPKRGYKWHIASILVILKNPVLYGGFRWAGEILEGAFEGYISKKEFEQLQKMLHDRQNFKRRETSSIFIFQAKILCPNCGSRLTCERSIYFRKKDNKNVESNHYRCQACALNKKPAIGISEKKFEKALIEYMQNANFKREPKIPQEKQQDYDKLHQKIISIEKQRKKYQKAWSMELMTDQEFEQLMAETKEALQKALAKLEQNDLHPIEKPLNIERAKELAKMFRENWSVLTGEEKRQTVQELIKHIEFEKKDNKARILDIHFY

SEQ ID NO: 153 - protein, 502 aa, Artificial Sequence
  Synthetic
MNKICIYLRKSRADEELEKTLGEGETLSKHRKALLKFAKEKKLNIVEIKEEIVSGESLFFRPKMLELLKEVENKQYTGVLVMDMQRLGRGNMQDQGIILETFKKSNTKIITPMKTYDLSNDFDEEYTEFEAFMSRKELKMINRRMQGGRVRSVEDGNYIATNPPLGYDIHWIKKSRTLKINAHECEIIKLIFKLYTEGNGAGSIAEHLNNLGYKTKFNNNFSRSSVLFILKNPIYIGKVTWKKKEIKKSKNPNKTKDTRTRDKSEWIVVDGKHEPIISMKMWNKAQEILNNKYHIPYQLVNGPANPLAGIVICSKCKFKMVMRKLKGIDRLLCRNNKCDNISNRYDSTEKAIVQALERYLNEYRINISNKNKTSNIKPYERQVNILEKELAALNEQKLKLFDFLERGIYDENTFLERSKNIEKRITKTSSGIEKINDIINKEKKVIKEEDVIKFQKLLDGYKNTDDIKLKNELMKKLVNKVEYTKDKRGETFGIDIFPKLKP

SEQ ID NO: 154 - protein, 471 aa, Artificial Sequence
  Synthetic
MTVGIYIRVSTEEQVKEGFSISAQKEKLKAYCTAQGWEDFKFYVDEGKSAKDMHRPLLQEMITHIKKGLIDTVLVYKLDRLTRSVVDLHNLLSIFDEYNCAFKSATEVYDTSSAMGRFFITIISSVAQFERENTSERVSFGMAEKVRQGEYIPLAPFGYVKGPDGKLIINEAEKEIFLHVVNMVSTGYSLRQTCEYLTNIGLKTRRSNDVWKVSTLIWMLKNPAVYGAIKWNNEIYENTHEPLIDKTTFDKLANILSIRSKSTTSRRGHVHHVFKGRLICPQCGKRLSGLRTKYVNKNKETFYNNNYRCATCKEHRRPAIQISEQKIEKAFIDYISNYTLNKANISSKKLDNNLRKQEMIQKEIISLQRKREKFQKAWAADLMNDDEFSKLMIDTKMEIDAAEDRKKEYDVSLFVSPEDIAKRNNILRELKINWTSLSPTEKTDFISMFIEGIEYVKDDENKAVITKISFL

SEQ ID NO: 155 - protein, 474 aa, Artificial Sequence
  Synthetic
MKCIVYVRVSTEEQAKHGYSIAAQLEKLEAYCISQGWELTEKYVDEGYSAKDLHRPYFEKMMNKIKQGNVDILLVYRLDRLTRSVMDLYKILKILDDNNCMFKSATEVYDTTNAMGRLFITLVAAIAQWERENLGERVRLGMEKKTKLGIWKGGTPPYGYKIVDKHLVINEKEQDVVKTVFELSKTLGFYTVAKQLTIKGFSTRKGGEWHVDSVRDIANNPVYAGYLTFNQNLKEYKKPPREQTLYEGNHEPIISKDEFWALQDILDKRRTFGGKRETSNYYFSSILKCGRCGHSMSGHKSGNKKTYRCSGKKAGKNCSSHIILEDNLVKKVFHVFDQIVGSINGPTNATEYSFEKVLELENELKSIERILNKQKIMYENDIIGIDELITKSTELREREKKINNELKNIKQNTPKNQKEIEYLTKNIESLWQHANDYERKQMITMIFSRIVIDTEDEYKRGSGNSREIIIVSAE

SEQ ID NO: 156 - protein, 470 aa, Artificial Sequence
  Synthetic
MKGESELDKKAAIYIRVSTQEQATEGYSIQAQTDRLTKYVEAKDFILYKKYIDAGYSASKLERPAMQELIQDVQSKKVDVIIVYKLDRLSRSQKDTMYLIEDIFRPNDVELISMQESFDTSTAFGSATVGMLSVFAQLERKSISERMITGRVERAKKGFYHTGGQDRPPAGYQFNSDNQLIINEYEAAAIKDLFRLYNDGLGKSSISEYLKKNYPGKNKWLPSSIDRMLKNSLYIGKVKFSGAEYDGIHEPIIDEVTFYKTQKEIARRKQSNTKRYNYVALLGGLCECGICGAKMANRRAVGRKGKVYRYYRCYSKKGSPKHMMKTDGCSSKAQQQFIIDEAVINNLKNIDVEAELKRRSAPQTNTSLISSQIESIDKQINKLIDLFQVDSMPLDVISEKIDKLNKEKQSMEKLLERKNKLDKTELQHRFDVLKSFDWDNSSIESKRVVIEMLVQKVIIHDNSIEIILVE

SEQ ID NO: 157 - protein, 458 aa, Artificial Sequence
  Synthetic
MNYERSYLRSCQVSTLEQKEHGYSIEEQERKLKSFCEINDWSVSDVFIDAGFSGAKRDRPELQRMMNDIKRFDLVLVYKLDRLTRNVRDLLDLLEVFEQNNVAFRSATEVYDTSTAMGRLFVTLVGAMAEWERETIRERVMMGKRAAIKQGMILTPPPFYYDRVDNTYIPNDYKKVVLWAYDEVMKGNSSKAIARKLNDSDIPPPNGKRWEDRTITRALRNPITRGHYTWGDVFIENSHEPIITEEMYQQIKERLEERINTKIVSHVSVFRGKFICPRCGGTLTLNTVTRKRKKGYVTYKTYYCNTCKAKKQSFGFSENEALRVFRDYLSKLDLEKYEVKTKQKDDVVTIDIDKIMEQRKRYHKLYAKGLMKEEELFGLIKETDETIAEYEKQKELVPRKSLDIDKIKKFKNALLESWEIFSLEDKADFIKMAIKSIDIDYVKLKNRHSIKINDIEFY

SEQ ID NO: 158 - protein, 463 aa, Artificial Sequence
  Synthetic
MKVAIYTRVSTAEQNLNGFSIHEQRKKLISFCEINEWKEYEVFTDGGFSGGSTKRPALQDLFSRLTQFDLVLVYKLDRLTRNVRDLLEMLERFEKYNVSFKSATEVFDTTTAIGKLFITIVGAMAEWERETIRERSLFGSRAAVESGKYIREQPFVYDNIEGKLVPNENTKYIEYIVKKFKEGNSANEIARLLNSKKKPSKIKNWNRQTIIRLIKNPVLRGHTKFGDIFMENTHEPVLSDDDYHKVINAIENKTHKSKSKHNAIFRGVLKCPQCNGNLHLYAGTIRPKNGRSYNVRRYTCDKCHRDKYSRNISFNESEIENKFIEELEKMDLTRFEIHKPKKVEINIESDKKRIKEQRTKLLRAYTMGYVEEEEFKIIMDETQRQLEDIKREENKETVQEIDEKQIKSIGNFIIEGWKTLTIKEKEKLILSSVDKIDIEFIPREKNNNSNTNTVNIKKVHFIF

SEQ ID NO: 159 - protein, 458 aa, Artificial Sequence
  Synthetic
MNYERSYLRSCQVSTLEQKEHGYSIEEQERKLKSFCEINDWSVSDVFIDAGFSGAKRERPELQRMMKDIKRFDLVLVYKLDRLTRNVRDLLDLLEIFEQNNVAFRSATEVYDTSTAMGRLFVTLVGAMAEWERETIRERVMMGKRAAIKQGMILTPPPFYYDRVDNTYIPNDYKKVVLWAYDEVMKGNSSKAIARKLNDSDIPPPNGKRWEDRTITRALRSPITRGHYTWGDVFIENSHEPIITEEMYQQIKERLEERINTKIVSHVSVFRGKFICPRCGGTLTLNTTTRKRKKGYVTYKTYYCNTCKGKKKSFGFAENEALRVFRDYLSKLDLEKYKVKTKQKDDVVTIDIDKIMEQRKRYHKLYAKGLMQEEELFELIKETDETVAEYEKQKELVPRKSLDIDKIKKFKNALLESWEIFSLEDKADFIKMAIKSIDIEYVKLKNRHSIEIKDIEFY

SEQ ID NO: 160 - protein, 461 aa, Artificial Sequence
  Synthetic
MNVAIYCRVSTLEQKEHGYSIEEQERKLKSFCEINDWNVADVFVDAGFSGAKRDRPELQRMMNDIKRFDLVLVYKLDRLTRNVRDLLDLLEIFEQNNVAFRSATEVYDTSTAMGRLFVTLVGAMAEWERETIRERTQMGKLAALKKGIMLTTPPFYYDRVDNKFVPNKYKEVVLFAYEEALKGKSAKSIARKLNNSDIPPPNNRKWEDRSITRALRSPFTRGHFEWGGVYLENNHEPIITEEMYEKVKDRLEERTNTKKIKHVSIFRSKLVCPTCHNKLTMNTHKVTLKDRVYYNKHYYCNNCKETPNLKPVYIRAEEVERVFYDHLQHQDLTQYDIVEDKEEKEVAIDINKVMQQRKRYHKLYANGLMNEDELAELIEETDIAIEEYKKQSENKEVKQYDTEDIKQYKNLLLEMWDISSDEEKAEFIQMAIKNIFIEYVLGKNDNKKKRRSLKIKDIEFY

SEQ ID NO: 161 - protein, 481 aa, Artificial Sequence
  Synthetic
MITTNKVAIYVRVSTTSQAEEGYSIEEQKAKLSSYCDIKDWSVYKIYTDGGFSGSNTDRPALEGLIKDAKKRKFDTVLVYKLDRLSRSQKDTLYLIEDIFIKNNIAFLSLQENFDTSTPFGKAMIGLLSVFAQLEREQIKERMQLGKLGRAKAGKSMMWAKTSYGYDYHRETGTITINPAQALAVKFIFESYIRGRSITKLRDDLNEKYPKHVPWSYRAVRAILDNPVYCGFNQFKGEIYPGNHEPIITEEVYNKTKEELKIRQRTAAENVNPRPFQAKYILSGIGQCGYCGAPLKIILGVKRKDGSRFKKYECHQRHPRTLRGITTYNDNKKCDSGFYYKDDLEAYVLTEISKLQDDAGYLDKIFSEDSAETIDRKSYKKQIEELSKKLSRLNDLYIDDRITLEELQNKSTEFISMRATLETELENDPALGKDKRKADMRELLNAEKVFSMDYEGQKVLVRGLINKVKVTAEDIIINWKI

SEQ ID NO: 162 - protein, 452 aa, Artificial Sequence
  Synthetic
MKAAIYIRVSTQEQIENYSIQAQTEKLTALCRSKDWDVYDIFIDGGYSGSNMNRPALNEMLSKLHEIDAVVVYRLDRLSRSQRDTITLIEEYFLKNNVEFVSLSETLDTSSPFGRAMIGILSVFAQLERETIRDRMVMGKIKRVESGLPLTTAKGRTYGYDVVDTKLYINEEEAQHLQLIYDIFEEEKSITFLQKRLKKLGFKVKSYSSYNKWLMNDLYIGYVSYSDKVHAKGIHEPIISEDQFYRVQEIFSRMGKNPNMNKESSSLLNNLIVCEKCGLGYVHRAKDTVSRGKKYHYRYYSCKTYKHTHELEKCGNKIWRADKLEEIIISRVKNYSFATRNLDKEDELDSITEKLKTEHSKKKRLFDLYINGSYEVAELDKMMADIDAQINYYDSQIEANKELKRNKKVQESLAELATVDFDSLEFREKQIYLKSIINKIYIDGEQVTIEWI

SEQ ID NO: 163 - protein, 465 aa, Artificial Sequence
  Synthetic
MNVAIYCRVSSQEQANEGYSIHEQERKLKSFCEVNNWKNYKVFVDAGVSGGTINRPAFNNLLANLDKFDLVLVYKLDRLTRSVRDLLSLLETFEEHGVSFRSATEVFDTTSAIGKLFITIVGAMAEWERSTIRERSLFGSHAAVREGNYIRVAPFCYDNIDGKLVPNEHKKVIEYIVKKLLEGVTATEIARRLNNANNYPPTIKNWSKTTVIRLVNNPVMRGHTKHGDLFIENTHEPIITEHNYKRISERLSSRVNYKKQTHTSVFRGVLECPQCGHKLHYFKSKLKNKSKTYYSEGYRCDYCRTDKTARNIAITFSEIEREFIEYMSNIRLSDNYGIEVEPKNEVIKIDINKIMRKRSRFQEAYGDGLMTKEEFKQKMKETQKLIDEYEEAESKNDVDDHITKEQVQAVQNLFRHIWDSPNVTREDKEEFVRQSIKKIDFDFIPKSKVNKTPNTLKINNIDLHF

SEQ ID NO: 164 - protein, 465 aa, Artificial Sequence
  Synthetic
MNVAIYCRVSSQEQANEGYSIHEQERKLKSFCEVNNWKNYKVFVDAGVSGGTINRPAFNNLLANLDKFDLVLVYKLDRLTRSVRDLLSLLETFEEHGVSFRSATEVFDTTSAIGKLFITIVGAMAEWERSTIRERSLFGSHAAVREGNYIRVAPFCYDNIDGKLVPNEHKKVVEYIVKKLLEGVTATEIARRLNNANNYPPTIKNWSKTTVIRLVNNPVMRGHTKHGDLFIENTHEPIITEHNYKRISERLSSRVNYKKQTHTSVFRGVLECPQCGHKLHYFKSKLKNKNKTYYSEGYRCDYCRTDKTARNIAITFSEIEREFIEYMSNIRLSDNYGIEVEPKNEVIKIDINKIMRKRSRFQEAYGDGLMTKEEFKQKMKETQKLIDEYEEAESKNDVDDHITKEQVQAVQNLFRHIWDSPNVTREDKEEFVRQSIKKIDFDFIPKSKVNKTPNTLKINNIDLHF

SEQ ID NO: 165 - protein, 376 aa, Artificial Sequence
  Synthetic
MKNKIAIYVRVSTTKESQKDSPEHQKWACIEHCKQIDLDTADLIIYEDRDTGTSIVARPQIQEMISDAQKGLFNTILFSSLSRFSRDALDSISLKRIFVNALGIRVISIEDFYDSQIEDNEMLFGIVSVVNQKLSEQISVASKRGIKQSAAKGNFIGNIAPYGYQKVNIEGRKTLIVDIEKAKVVREIFDLYVNKKMGEKEITKHLNENAIPSAKGGTWGITSVQRILQNEIYTGYNVYGKYEIKKVYTNLKNIGDRKRKLVKKDQELWQKSEKRTHPEIISQELYKKAQEIRQIRGGGKRGGRRKYVNVFAKIIYCKHCGSAMVTASCKKSDKYRYLICSKRRRHGASGCPNDKWIPYYDFRDEVISWVVEKLKK

SEQ ID NO: 166 - protein, 596 aa, Artificial Sequence
  Synthetic
MARTKKATAPAIYASPRVYSYLRFSNAKQASGASIARQLDYAVKWAEQHGMELDTSLTLKDEGLSAFHEKHIEKGNFGVFLKAIEDGLIPPGSVLIVESLDRLSRAEPIIAQAQLYGILIAGIEVVTAADNTRISLESVKKNPGILFLALGVSMRANEESERKKDRILDAAHRNAQAWQAGTSRKRAAVGKDPGWVKYNAKTNEYELLPEFVTPLMAMLGYFRAGASTRRCFAMLHEAGIPLPPPKLDLHGKLKKTRMGNVISGLANTTRLYDIMSNRALIGEKTIVLGKSQYHDAQTYVLSGYYPPLMTEAEFEELQQMRKQGGRVANHQSRIVGIINGVGITKCMRCRSAMAGQNVLSRSRRADGKPQDGHRRLICTGVTKAKNLCTESSVSIVPIERAIMAYCSDQMNLTALFTEQEDQSRNLNGQLALARAAVAQTEAAMQKLLDAIEAAGDDTPAMFIQRARKREIELKTQQQAVADLEYKIESAHRASRPAMAEVWAKLRNGVEQLDPAARTKARLLVVDTFKRIEIKRATDRGQDLIEIRLESKQNVRRGFLIDRKTGAFYRGDHVENESIIAKPTTRPTRARRVKAAA

SEQ ID NO: 167 - protein, 510 aa, Artificial Sequence
  Synthetic
MLKIAIYSRKSVETDTGESIKNQIAICKQYFQRQNEECKFEIFEDEGFSGGNINRPDFKRMMQLVKIKQFDVVAVYKVDRIARNIVDFVNVFDELDKLNVKLVSVTEGFDPSTPIGKMMMMLLASFAEMERMNIAQRVKDNMRELAKLGRWSGGTAPSGYSVQKVKENGKEVSYLKKEKDADNIKLIFQKYASGYTAFEIHKYFKLKGFTYNPKTIYGILTNPTYLEATEESIKYLENKGYTVYGEPNGCGFLPYNRRPRYKGIKAWKDKSMMVGVSRHEPAVDLNLWIAVQSQLEKKTVAPHPHESKFTFLTGGIMKCRCGAGMGVSPGRIRSDGTRVYYFTCSGKRYRQNGCSNLSLRVDWAESKVKTFLEKMRDKETLTKYYNSNKKKSNVDRDIKSINKKIASNKKAVDSLVDKLILLSNDAAKPLAERIEDITQESNALKEELLKLEREKLFNSNDRLNIDLIHKAIIQFLDTDSLEEKKKFAKDIFDKITWDSASKELLFFLQM

SEQ ID NO: 168 - protein, 473 aa, Artificial Sequence
  Synthetic
MTVGIYIRVSTQEQASEGHSIDSQKERLASYCNIQGWEDYRFYVEEGISGKSTNRPKLQLLMDHIEKSQINTLLVYRLDRLTRSVIDLHKLLNFLNLHNCALKSATETYDTTTANGRMFMGIVALLAQWESENMSERIKLNLEHKVLVEGERVGAVPYGFDLSDDEKLIKNEKSPILLDMVKKVESGWSANRVANYLNLTNNDRNWTANAIFRLLRNPAIYGATKWNDKIAEKTHEGIIDKERFVRLQQIFSDRSIHHRRDVKSTYIFQGVLHCPNCSNKLSVNRFNRKRKDGSEYHGVIYRCQPCAKQNKMNFTIGEARFSKALIEYMARVEFQPQEEEITSTKSGRDIHQSQLQQIERKRGKYQKAWASDLISDTEFEKLMNETRYAYDECKKKLHECEEPIKQDIERLKEIVFVFNETFNDLTQDEKKEFISRFIRNIRYTTQEQQPIRTDQSKSRKGKPKVIITEVEFY

SEQ ID NO: 169 - protein, 257 aa, Artificial Sequence
  Synthetic
MRAAIYTRVSTFDQVNGYSLDMQAHLAKQYCRDKGIDIYDVYCDEITGAKFDRPQLQRMLTDIVSKKIDLVVIHKLDRLSRSLKDTFVIVEDYLIANDVELVSLSEAIDTTTPIGKMMMGQFALYAQYERDVIRERMIMGKYGRAMTGKAMSWAPGYTPLGYDYKDGLYIPNNDKIIVVEIFDELYKGTKPKSLAKKLTYKGTLNKKWYHTSIKYIARNPVYIGKIKWRGKEFEGNHQPLIAKDFFRAVQEILDEYK

SEQ ID NO: 170 - protein, 465 aa, Artificial Sequence
  Synthetic
MYYERSYLRSCQVSTLEQKEHGYSIEEQERKLKSFCEINDWTVTDTFIDAGFSGAKRDRPELQRLMNDINKFDLVLVYKLDRLTRNVRDLLDLLEIFEQNNVAFRSATEVYDTSTAMGRLFVTLVGAMAEWERETIRERTQMGKLAALKKGIMLTTPPFYYDRVDNKFVPNKYKEVVLFAYEEALKGKSAKSIARKLNNSDIPPPNNRKWEDRSITRALRSPFTRGHFEWGGVYLENNHEPIITEEMYNKIKDRLNERVNTKVIAHTSVFRGKLTCPTCGAKLTMNTNKKKTRNGYTTHKNYYCNNCKITPNLKPVYIKEREILRVFYDYLLNLNLEKYEIEEKQSEPEITVDIHKVMEQRKRYHKLYANGLMQEDELFDLIKETDEAIKEYESQTKNKVEKQFDIEDVKKYKKLLLEMWNVSTLEDKAEFVQMAIKSIEFDYIIDDGPPTSRKHSLKINQIIFY

SEQ ID NO: 171 - protein, 465 aa, Artificial Sequence
  Synthetic
MYYGRSYLRSCQVSTLEQKEHGYSIEEQERKLKQFCEINDWTVSDTFIDAGFSGAKRDRPELQRLMNDINKFDLVLVYKLDRLTRNVRDLLDLLEIFEQNNVAFRSATEVYDTSTAMGRLFVTLVGAMAEWERETIRERTQMGKLAALKKGIMLTTPPFYYDRVDNKFVPNKYKEVVLFAYEEALKGKSAKSIARKLNNSDIPPPNNRKWEDRSITRALRSPFTRGHFEWGGVYLENNHEPIITEEMYNKIKDRLNERVNTKVVAHTSVFRGKLTCPTCGAKLTMNTNRKKTQNGYTTHKNYYCNNCKIMPNLKPVYIKEREVLRVFYDYLLNLNLEKYEIEEKQSEPEITVDIHKVMEQRKRYHKLYANGLMQEDELFDLIKETDEAIKEYESQTENKVEKQFDIEGVKKYKKLLLEMWNVSTLEDKAEFVQMAIKSIEFDYIIDDGPPTGRKHSLKINQIIFY

SEQ ID NO: 172 - protein, 509 aa, Artificial Sequence
  Synthetic
MLRIAIYSRKSVETDTGESIQNQIKLCKEYFKRQDPNCIFEIFEDEGYSGGNINRPSFQRMMELVKIKQFDIVAVYKIDRIARNIVDFVNTYDELDNIGVKLVSITEGFDPSTPAGKMMMLLLASFAEMERMNIAQRVKDNMRELAKMGRWSGGTPPKGYTTKKVIENGKKITYLDLIDDEAYIIKDAFKLYAEGYSTYKINKHFKEKGIRLPQKTIQNMLNNPTYLISSKESVDFLKNKGYTVYGEPNGFGFLPYNRRPRTKGKKSWNDKSQFVGVSKHEGIIDLPLWIEVQNKLKERTVDPHPRESNFTFLSGGLLKCSCGSSMFVHPGHTRKDGSRLYYFRCMKNNGNCSNSKFLRVDYAESSILEFLESISSKEKLTEYQKKKKPRLDFSIEIKNLNKKIRDNSKAIDNLIDKLMILSNEAGKVVATKIEELTKQNNILKESLLEIERKKLLSGLEDNNLNILYNEIQNFIQTEDISLRRLKIKNIIKYITYNPQNDSLQVELVD

SEQ ID NO: 173 - protein, 551 aa, Artificial Sequence
  Synthetic
MATKARVYSYLRFSDPKQAAGSSADRQLEYAKRWAAEHGMTLDAALSMQDEGLSAYHQRHVTKGALGVFLAAIDEGRIPAGSVLIVEGLDRLSRAEPIQAQAQLAQIINAGITVVTASDGREYNRAGLKAQPMDLVYSLLVMIRAHEESDTKSKRVRAAIHRQCRGWQDGSWRGVIRNGKDPSWTRLEPETKTFQLVPERAEAVKLAIRMFRDGHGAVRIMRTLAEEGLQLTNGGNPAGQLYRILRNRALIGEKVLEIDGEEYRLAGYYPSLLSAEQFADLQQATEQRAKQKGTGEIPGLITGLRISYCGYCGSAMVAQNLMNRGRREDGGPQHGHRRLICVGNSQGMGCAVAGSCSVVPIEHAIMSYCADQMNLARLFEGGDRSEALGGRLAIARARVADTTAKIERITDAMLADDAGDAPAAFMRRAREMEAALAAQQSEVEALEHEMAAIGSSPTPAVAKAWADLQEGVKALDYDARTKARQLVADTFERISIYHRGTEPEQTRSWKGTIDLVLVAKRGSARILHVDRQTGEWRGGEEVRDLPDDPVQ

SEQ ID NO: 174 - protein, 454 aa, Artificial Sequence
  Synthetic
MRCAIYRRVSTDEQAEKGHSLDNQKFRLESFAMSQGWEITGDYVDDGYSGKNMERPALKRMFADIDNFDVILVYKLDRFTRSVRDLNDMLETIKGHEIAFKSVTEAIDTTTATGRMILNMMGSTAQWEREMISERIKDVLGKLAEQGIFPKGKPTYGYKIKNGVISIDEEEAKIVKLIFEKSKTLGQHAVSKYLRDNGIYTPSGSTWMSGGIGRIIRNPFYYGEMKVNGKLIAIKNEGYTPLISKEEFDLVNRISKSRNMKKTKRKSNIIYPFSGIALCPRCNKPLRGDRSKIGEKYYTYYRCMNAREGRCTIKRIKTQVIDIAFSEYVSGAFNESNIQIDNKDESIALERKIEALKSKVDRLKELYIDGDITKVRYKEQTDAINIEINSMQDKMLSLDDGKITEKAIEQAKELEKVWLLLDDKTKDESLRSVFDTITLKETEHGIIITSHSFL

SEQ ID NO: 175 - protein, 547 aa, Artificial Sequence
  Synthetic
MKLLVTYIRWSTKEQDSGDSLRRQTNLIDAFYSKHKNDYYLLPAHRYVDKGKSGFHQQHKNQGSDFRRMFENVMSGVIPEGSLIVVENFDRFSRADIDTAIDDVRQILRKGVSILTLGDGELYDKSALTDPVKLIKHIIIAERAHQESLVKQKRIAQVWNHKTQLARELKKPMGKQAPGWLELSDDGSHYIVDEDKASLVNIIYDKRLSGMSMFAICKWLNEQGYPTINQRKVRISKTKKPDGNWSALSVKHILTSRSVLGYLPAKISTEDRKTVLREEIESFYPQIVTDSKFYAVQQLLEETGKGKTSSGEHWLYVNILKGLIRCKCGLVMTPTGIRKPVYQGTYRCNGNKESRCSYGTVSRKLLDTQLCSRLFSKLSQLHDEATDTAKLDELQRRLNIVDSELEKLTETLIQLPNITQIQEALRVKQGEKDELIVQLSREKARVKSVSSLNLSGLDMESVEGRTEAQIIIKRLVKEIVVSGNEKLVDIYLHNGNMIRGFPLDGKDDHTLTLEEATDEMQPLDDMLIFGEPVTRIYPAGDMEEVDA

SEQ ID NO: 176 - protein, 543 aa, Artificial Sequence
  Synthetic
MGKNGARVYSYLRFSDPRQATGSSADRQLAYASAWASKHGMELDATLTLRDEGLSAYHEAHVKQGALGAFLRAVDEGRIPAGSVLIVEGLDRLSRAEPLLAQAQLGQIVNAGITVVTASDGREYNREGLKAEPMNLVYSLLVMIRAHEESDTKSKRVKAAVRRQCEAWVAGSYRGRIVSGKDPQWLAWDGDSWQFIPERVEAVRFALDAYRSGIGAARLVRLMHEKGMVLSDWGIAAQQVYRLVRLPALRGAKRISIDGENFMLEDYYPRLLSDEEFSELETLVGQRYRRRGKDEIVGIVTGIGITRCGYCGTALVAQNLMQRVKADGSLEDGHRRLHCVSYSKNGGCNGGSCSSVPIERAVLAYCSDQMNLQRLLEPSSAGEDLRPRLVEAQKGVAEIERQLERVTDALLADDSGAAPLAFVRKARELEEDLERRRSAVQALEQELVAKSASAPAAGASKWAELAERAKSMADVDAREQARQLVMDTFETLVVYMRGVIPNPKGRYIDVMMKSRAGQTRWIRVDRRTGVWKKGADRPTTRRP

SEQ ID NO: 177 - protein, 543 aa, Artificial Sequence
  Synthetic
MGKNGARVYSYLRFSDPRQATGSSADRQLAYASAWASKHGMELDATLTLRDEGLSAYHETHVKQGALGAFLRAVDEGRIPVGSVLIVEGLDRLSRAEPLLAQAQLGQIVNAGITVVTASDGREYNREGLKAEPMNLVYSLLVMIRAHEESDTKSKRVKAAVRRQCEAWVTGSYRGRIVSGKDPQWLAWDGDSWQFIPERVEAVRFALDAYRSGIGAARLVRLMHEKGMVLSDWGIAAQQVYRLVRLPALRGAKRISIDGEDFMLEDYYPRLLSDEEFSELETLVGQRYRRRGKDEIVGIVTGIGITRCGYCGTALVAQNLMQRVKADGSLEDGHRRLHCVSYSKNGGCNGGSCSSVPIERAVLAYCSDQMNLQRLLEPSSAGEDLRLRLVEAQKGVAEIERQLGRVTDALLADDSGAAPLAFVRKARELEEDLERRRSAVQALEQELVAKSASAPAAGASKWAELAERAKSMADAEAREQARQLVMDTFETLVVYTRGVIPNPKGRYIDVMMKSRAGQTRWIRVDRRTGVWKEGADRPTTRRP

SEQ ID NO: 178 - protein, 543 aa, Artificial Sequence
  Synthetic
MGKNGARVYSYLRFSDPRQATGSSADRQLAYASAWASKHGMELDATLTLRDEGLSAYHEAHVKQGALGAFLRAVDEGRIPAGSVLIVEGLDRLSRAEPLLAQAQLGQIVNAGITVVTASDGREYNREGLKAEPMNLVYSLLVMIRAHEESDTKSKRVKAAVRRQCEAWVAGSYRGRIVSGKDPQWLAWDGDSWQFIPERVEAVRFALDAYRSGIGAARLVRLMHEKGMVLSDWGIAAQQVYRLVRLPALRGAKRISIDGENFMLEDYYPRLLSDEEFSELETLVGQRYRRRGKDEIVGIVTGIGITRCGYCGTALVAQNLMQRVKADGSLEDGHRRLHCVSCSKNGGCNGGSCSSVPIERAVLAYCSDQMNLQRLLEPSSAGEDLRPRLVEAQKGVAEIERQLERVTDALLADDSGAAPLAFVRKARELEEDLERRRSAVQALEQELVAKSASAPAAGASKWAELAERAKSMADVDAREQARQLVMDTFETLVVYMRGVIPNPKGRYIDVMMKSRAGQTRWIRVDRRTGVWKKGADRPTTRRP

SEQ ID NO: 179 - protein, 523 aa, Artificial Sequence
  Synthetic
MAVSRNVTVIPAIKRIGNNKNSESKPKIRVAAYCRVSTDSEEQASSYEIQIEYYTNYIKRNKEWELAGIFADDGITGTNTKKRDEFNRMIEECMAGNIDMIITKSISRFARNTLDCLKYIRQLKDKNIAVFFEKENINTMDSKGEVLLTIMASLAQQESQSLSQNVKLGIQYRYQQGEVQVNHKRFLGYTKDENKQLVIDPEGAKVVKRIYREYLEGASLLQIARGLEADGILTAAGKAKWRPETLKKILQNEKYIGDALLQKTYTVDFLSKKRVKNNGIVPQYYVENSHEPIIPRELFMQVQEEMVRRANIRGGKGGKKRVYSSKYALSSIVYCGQCGDIYRRVHWNNRGYKSIVWRCVSRLEEKGSECTAPTINEETLQAAVVKAINELLTNKEPFLSTLQKNIATVLNEENDNTTDDIDRRLEELQQQLLIQAKSKNDYEDVADEIYRLRELKQNALVENADREGKRQRIAEMTDFLNKQSRELEEYDEQLVRRLIEKVTIYEAKLTVEFKSGIEIDEEI

SEQ ID NO: 180 - protein, 471 aa, Artificial Sequence
  Synthetic
MTVGIYIRVSTDEQVKEGFSISAQKEKLKAYCTAQGWEDFKFYVDEGKSAKDMHRPLLQEMITHIKKGLIDTVLVYKLDRLTRSVVDLHNLLSIFDEYNCAFKSATEVYDTSSAMGRFFITIISSVAQFERENTSERVSFGMAEKVRQGEYIPLAPFGYVKGPAGKLIVNEAEKEIFLHVVNMVSTGYSLRQTCEYLTNIGLKTRRSNDVWKVSTLIWMLKNPAVYGAIKWNNEIYENKHEPLINKATFNKLANILSIRSKSTTSRRGHVHHVFKGRLICPQCGKRLSGLRTKYVNKNKETFYNNNYRCATCKEHRRPAIQISEQKIEKAFIDYISNYTLNKADISSKKIDNNLRKQEMIQKEIVSLQRKREKFQKAWAADLMSDDEFSKLMIDTKMEIDVAEDRKKEYDVSLFVSPEDIAKRNNILRELKINWTSLSPTEKTDFISMFIEGIEYVKNDENKAVITKIRFL

SEQ ID NO: 181 - protein, 564 aa, Artificial Sequence
  Synthetic
MSKLSKPKVYSYLRFSDPKQAAGSSADRQMEYAARWAAEHEMQLDASLTLRDEGLSAFHQRHIKQGALGVFLRAVEDGRILPGSVLVVEGLDRLSRAEPIQAQAQLAQIINAGITVVTASDGRRYNRERLKAQPMDLVYSLLVMIRAHEESDTKSKRVKAAIRRQCEGWVAGTWRGIVRNGKDPHWVRQVENGAFEFLPERELAIRTMIDLFLAGHGAIEIARILSERELYVSNAGNYSTHMYRIVRNRALIGEKSLTVDGEEFRLAGYYPALLTPDAFATLQEAMSERGRRKGKGEIPNILTGLSISSCGYCGLALVSQNTAIRPAKGRAFTRRLGCSGATFNTGCPVGGTCDARIVERALMHYCSDQFNLTRLLEGDDGAARRVAQLAVARQRAGEIEMQIQRVTDALLSDDGVAPVAFMRRARELEGELEQQHREIEVLEHQIAASNAHEIPAAAEAWAQLVDGVLALDYGARMKARQLVADTFRKIVLFQRGFTPFNNAPADRWKRSGTIGLLLVTKRGGMRLLNIDRKTGQWEAEDNLDLAPHHADEIPLPPTVQGMEC

SEQ ID NO: 182 - protein, 564 aa, Artificial Sequence
  Synthetic
MSKLSKPKVYSYLRFSDPKQAAGSSADRQMEYAARWAAEHEMQLDASLTLRDEGLSAFHQRHIKQGALGVFLRAVEDGRILPGSVLVVEGLDRLSRAEPIQAQAQLAQIINAGITVVTASDGRKYNRERLKAQPMDLVYSLLVMIRAHEESDTKSKRVKAAIRRQCEGWVAGTWRGIVRNGKDPHWVRQVENGAFEFLPERELAIRTMIDLFLAGHGAIEIARILSERELYVSNAGNYSTHMYRIVRNRALIGEKSLTVDGEEFRLAGYYPALLTPDAFATLQEAMSERGRRKGKGEIPNILTGLSISSCGYCGLALVSQNTAIRPAKGRAFTRRLGCSGATFNTGCPVGGTCDARIVERALMHYCSDQFNLTRLLEGDDGAARRVAQLAVARQRAGEIEMQIQRVTDALLSDDGVAPVAFMRRARELEGELEQQHREIEVLEHQIAASNAHEIPAAAEAWAQLVDGVLALDYGARMKARQLVADTFRKIVLFQRGFTPFNNAPADRWKRSGTIGLLLVTKRGGMRLLNIDRKTGQWEAEDNLDLAPHHADEIPLPPTVQGMEC

SEQ ID NO: 183 - protein, 502 aa, Artificial Sequence
  Synthetic
MKMKSVLYARVSTEDLEQNNSYIQQQLYQDDRFEIVKIFSDKASGSSVDGRESFLEMLKYVGISKEGNNYFVEHRTEIECIIVANVSRFSRSVVDARLIIDALHKNNVKVFFVDLNKFSDDADIFLQLNMYLMIEEQYLRDVSKKVKAGMQRKQSTGYILGSNKIWGYNYVTKDDGKGYLVPHETESLMVKNIFKEYITGAGTRTLAKKYKLSSSTILGILKNTKYCGYMGYNLKSDNPTYVKSPFIEPLISTEAFEEVQRIIKGRCNSESGRGRRIKVRNLTGKIKCECGANYHYKQRETEWCCGREGVEGRTKGCGSPQFNTKLIIPYLEKNIDNIEKNLEFNLNREIKDINVGSFDRLNQRKEELIRQQDKLLDLYLDEDKLKNISKEMLERRSKLIKEEIEEVEEKLVILNDMSSHLNNLRRIKVEYKNEIKNIRRLIEEKNLDEIEKLISKIQLETIVNIINFRKELRIKEIQFTCFNELYNTNFIFAPEPKKVWDK

SEQ ID NO: 184 - protein, 472 aa, Artificial Sequence
  Synthetic
MEKVAIYIRVSKKEQSRDKGSDSSLNLQLKKCLDYCKEKDYEVLKVYQDIESGRIDDRKEFNELFEAISKKIYTKIVFWEISRIARKISTGMKFFEELELYKITFDSISQPYLKDFMTLSIFLAWGTEDLKQMSLRIKSNLEEKTKAGYFVHGRPATGYIRGENKMIIPDPQKAPYILSIFETYAKNFNLTETARIFNKTRKDIVEIIDNKIYIGYVPFRKYIQELNQKKRTQVNKKDIKWYKGLHEPIVPLELFEFCQSIREKNIKSRAAYGDYKPHLLFSSMIYCECGDKMYQQKRNRTYKDNTNYVYYSYSCKNRKHKKSFSARIMDKTIKEMILNSKELEDLNNYNSNDIEKSEKKLLKLENNLKLLENERERIINLFQKSYISEDELENKFKDLNTRIQIAKEKKIEFENTLNIPRNNDIKVLEKLKFIIENYDEEDVIETRKILKMIIKEIRVISFYPLKISILFY

SEQ ID NO: 185 - protein, 517 aa, Artificial Sequence
  Synthetic
MKTIHKLARPQLPEPPKLKVAAYARASTSSNEQLASLQTQITHYENHIQNNDQWEYVGVYYDEGTSGTKVEKRDGLHRLIKDAELGKIDLILTKSISSFSRNTVDCLNLVRKLTDIGVTIFFEKENINTGDMESELLLSILSSLAESESYSHSENMKWANRKRMAKGIFKTVPPYGYQRKGADFYLIPDEAKVIEQIFKWALEGVSAYQVAKRLNEKNIFTRKGSKWQDSGINNILHNIVYTGTMIHQRYFNDDQFRKKKNNGELPMYRIDNNHPPIISWEDYERVQELITLRANAKGTSKGSQKYSQRYVFTKRIICDKCGCNYKRVHIAGKGNTKVVKWSCTGHLKNKDGCDALPITDESLKTAYLTMLNKLILGHTIVLEPLINTPVEGKASKQELEKLSIEITKIDEKLEVLASLNASGVVSTKTALEEQGRLQMELNKLQEKQHKIMESVNGTSTQRIQLEQLHQFTKRSEMLTEWDEDLFLRFAELIVVYSRQEVSFELKCGLLLKERLEA

SEQ ID NO: 186 - protein, 520 aa, Artificial Sequence
  Synthetic
MRKITTLDVTTSSAVKPKQKVAAYIRVSTSNEDQLISLEAQRRHYKTLIEKNVEWQLIDIYSDEGITGTKKDRRPELIRLISDCEKGKIDFILTKSISRFARNTIDCLELVRKLMDLGVHIYFEKENINTNSMESELMLSILSSLAENESVSLSENSKWSIRQRFKRGTYKLSYPPYGYDYIDEQVIVNKKQAQVVKRIFNSVLEGVGTERIARQLNKEKIPTKRNGKWTGTTIRGIIKNEKYTGDVLLQKTYTDEHFNRKVNQGELDQYLIENHHEAIITHADFEVANRMLEYQASQKNIAVGSRKYLNRYPFSGKIECAECGDTFKRRIHTSTHSKYIAWCCSTHIKNKDECSMLFIREERIHQAFITMMNKLKFGYSYVLTSLSKQLETSNQDETYQKITEIEEQLEVIKDKLNTLIQLMAKGFLEPAIFNEQKIELSQRHMKLKEEREQLLYLINDGSNQLSEVKRLIKYFKQGKFIDAFDEESFQDIVKKIIVYSPNEIGFHLNCGITLREGVKR

SEQ ID NO: 187 - protein, 519 aa, Artificial Sequence
  Synthetic
MKRITKIEQDNANALMPKLRVAAYCRVSTASDDQLVSLEAQKTHYESYIKANPEWDFAGVYYDKGVTGTKTEGRDELLRLISDCENGLVDFIVTKSISRFSRNTLDCLELVRRLLDIGVFVYFEKENLNTQSMEGELMLSILSGLAESESVSISENNKWSAQKRFQNGTFKVAYPPYGYDNVDGQMVINEEQAEIVRWMFAQALAGKGAHKIASELNERGVPTRKGGNWTATTVRGLLANEKFTGDILFQKTYTDSQFNRHHNNGERDRYFMEDHHPAIVSRETFEAVAAVIGQRGKEKGVTRGSKYQNRYPFSGRIVCSECGSTFKRRIHYSTHQKYIAWCCSRHIEMIEACSMQFIRNDAVEAAFITMMNKLVYGHRTILRPLLDALRGTNDTGAYHKVAELESRMEEVMERSQVLTGLMTKGYLEPALFNKEKNALEAELENLQRQKDSLSRVLNGNLAKTEEVSRLLKFAAKAEMASDFDGDLFEKYVDRVVVYSRTEIGFELKCGLTLKERLVR

SEQ ID NO: 188 - protein, 528 aa, Artificial Sequence
  Synthetic
MKVPVWCYARISTLKQIDGFGIQRQINTINQFLQYVVLDHRLPFTLDVDNVTQMVAEGKSAFRGGNWKPSTKLGKYRKMVMDGVISDSVLIVENIDRLTRLDPFQAVEIISGLINRGTTILEIETGMTYSRYIPESITVLTMQINRANGESKRKSIMMQKSHANRYGKVSKVRPRWFDVVEIDGIKQYRPNETAKAIQRMYNDYINGIGAAHIVRTYGNTDNGKAWTLVTVLRALSDKRVADDARYPPIIDKELYDSVQALKAATNKKGNTHQKNMLNIFSGMSRCPVCNQSIIVKRNSHGNLFTVCLGKRTNKTCEARSISYFALERPLLTAISGLDFSEVYKHEDKNVLTLRDQWIQNERDIAAFRERLNKASRHEKFAILDELEIMNREQEELTIRLKSVDVPKDIQLTFDDDKLDLDTNYRIELNNRIKKLIQHINIVREDVSKSSYTIYCTIKYWTDVISHLVIIDVNIKRTGTGGTNTLTTTLRSVSSLNMDGTVSGNPDSDAWEYWKSFLDGTIGLVDYKK

SEQ ID NO: 189 - protein, 457 aa, Artificial Sequence
  Synthetic
MRCAIYRRVSTDEQAEKGFSLENQKLRLESFATSQGWEVVEDYVDDGFSGKDTNRPALQRMFSNVDKFDVILVYKLDRFTRSVKDLNEMLETIKKNEIAFKSATESIDTTTATGRMILNMMGTTAQWERETISERIKDVFGKLRENGIFSTGHPPYGYRCSGNKSIEIVEEQAEMVRYIYELSKTMGLFKISVELNRKGIKTRRNNKFGQSAVKRILHNPFYCGYMEVDNKWVPIKNEGYTPIISEEEFKTTQKILTKRTKAQTRSRSVSYYPFSGIVLCPECQRAMRGDRAKYGDYYYRYYRCVYGRENINCTNRKRIRAEQVDKAFAEYISRSFENTTIKLDSRDIKSDIEYELKHLDSKIERLSDIYIEGDITKSKYNEKMNSLLNEKEKLKKDLTSCKEHVDAEFVRNQINKLESIWNLIDDKTKSESIRSIFDTIKIKQDKNTVTIMDHTLL

SEQ ID NO: 190 - protein, 452 aa, Artificial Sequence
  Synthetic
MKAAIYIRVSTQEQVENYSIQAQTEKLTALCRSKDWDVYDIFVDGGYSGSNMNRPALNEMLSKLHEIDAVVVYRLDRLSRSQKDTITLIEEYFLKNNVEFVSLSETLDTSSPFGRAMIGILSVFAQLERETIRDRMVMGKIKRVESGLPLTTAKGRTFGYDVVDTKLYVNKEEAQHLQLIYDIFEEEKSITFLQKRLKELGFKVKSYSSYNKWLMNDLYIGYVSYSDKVHVKGVHEAIISEEQFYRVQEIFSRMGKNPNMNRDSSSLLNNLIACEKCGLSFVHRVKDTASRGKKYRYRYYSCKTYKHTHELEKCGNKIWRADKLEEIIIDRVKNYSFATRNLDKEDELDSINAKLQVEHSKKKRLFDLYMNGSYEVAELDKMMADIDAQINYYNSQIEANEELKRNKKVQESLAELATVDFDSLEFREKQIYLKSIINKIYISDEQVTIEWI

SEQ ID NO: 191 - protein, 460 aa, Artificial Sequence
  Synthetic
MKVAIYTRVSTLEQREKGHSIDEQERKLRSFCDINDWTVKDVYVDAGFSGAKRDRPELTRLLDDISEFDLVLVYKLDRLTRSVRDLLDLLEVFENNNVAFRSATEVYDTTTAIGRLFVTLVGAMAEWERETIRERSLMGKRAAIKKGMILTAPPFYYDRVNNTYIPNQYKDVVLDVYNKVKKGYSIAHIARLYNNSDVKPPNGNEEWTTRMLMHALRNPVTRGHYQWGEIYIEDSHEPIITDEMYNTIIDRLDKHTNTKVVAHTSVFRGKLICPNCGYALTLNSQKRKRKNDTIVYKTYYCNNCKITKGMKPHHITETETLRVFKDHLSKIDLKQYETQEKEKQSHVTIDLSKVMEQRKRYHKLYASGMMQENELFELIKETDEMIEEYEKQRKQVDVKEFDIGKIKEIKNVLLKSWDIFTLEDKADFIQMSIKAINIEYTKLKRGKASNSMKIKDIEFY

SEQ ID NO: 192 - protein, 550 aa, Artificial Sequence
  Synthetic
MTILDTPPTFRGLPPADDDAEKWLAYLRVSTWREDKISLDLQRTAIQAWERRGPRRVVEYVEDPDVTGRNFKRKIMGCIRRVEAGEIRGIVVWKFSRFGRNDMGIAVNLARVEKAGGDLVSATEDVDARTAVGRFNRRILFDLATFESDRAGEQWKETHQWRRAHGLPATGGRRLGYIWHPRRIPHPTDPGQWTIQREWYEVEERARDHIEDLYARKIGDGYPVPDGYGSLAAWLNGLGYRTGDGNPWRADSLRRYMLSGFAAGLLRVHHPDCRCDYTANGGRCTRWIHIDGAHEAIITPETWERYEAHVAERRRMTPRARNPTYPLTGLIRCGGCREGAAATSARRASGRVLGYAYMCGQSRNGLCENPVWVQRYIVEDEVRGWLAREVAADVDAAPATPEPVERDNRRAREERERARLEGEHTRLTNALTNLAVDRAMNPESYPEGVFEAARERIVKQKQAVAEALEALAAVEATPERAALMPLAVGLLEEWETFEAPETNGILRSLVRRVALTRGAKGKKGVEGSGETRIEVHPVWEPDPWADDAPQ

SEQ ID NO: 193 - protein, 458 aa, Artificial Sequence
  Synthetic
MNYERRYLRSCQVSTLEQKEHGYSIEEQERKLKSFCEINDWSVSDVFIDAGFSGAKRDRPELQRMMNDIKRFDLVLVYKLDRLTRNVRDLLDLLEVFEQNNVAFRSATEVYDTSTAMGRLFVTLVGAMAEWERETIRERVMMGKRAAIKQGMILTPPPFYYDRVDNTYIPNNYKKVVLWAYDEVLKGVSSKGIARKLNDSDIPPPNGKRWEDRTITRALRSPITRGHYTWGDVFIENSHEPIITEEMYQQIKERLEERINTKIVSHVSVFRGKFICPRCGGTLTLNTVTRKRKKGYVTYKTYYCNTCKAKKESFGFSENEALRVFRDYLSELDLDKYKVKTKQNDDVVTIDIDKIMEQRKRYHKLYAKGLMQEEELFELIKETDETIAEYEKQKELVPRKSLDIDKIKKFKNALLESWKIFSLEDKADFIKMAIKSIDIEYVKLKNRHSIKINDIEFY

SEQ ID NO: 194 - protein, 449 aa, Artificial Sequence
  Synthetic
MLKRAALYIRVSTDQQAKHGDSLDAQIATLKDYVSTQDNLTIIDTYIDDGISGQKLYRDEFQRLLEDIKKNRIDIILFTKLDRWFRNLRHYLNIQEILDNSGVTWLAVSQPFFNTDTAYGRSFVNQSMSFAELEAQMASERIKAVFENKIRKGEVVTGSVPFGYKICDKKLIPNENAPIAKDIFKHYSIHNSIRLTVEYLFNEYDITRSSRTIKHMLRNRKYIGEVSGNKNYCPPIVDKETFEKVQNLLDKNISSIAKRTYIFSGLVVCSCCGKKMTGRYRKRKYIKKDGTVMYYTKKVYRCNGNTYKRNKCPNKINIPEEILEEYLLNNIKADAENFEAKQKKIAVSAPEKNNNSKILKKIERLKKAYLNEVISLDEYKKDRKELEQMIVQVKPKETIVFKSNWFKKNIESTYRDFDEEEKRFVWRSVLKNLIVDPHGKITINFLTKN

SEQ ID NO: 195 - protein, 517 aa, Artificial Sequence
  Synthetic
MKTIHKLARPQLPEPPKLKVAAYARVSTSSNEQLASLQTQITHYENHIQNNDQWEYVGVYYDEGISGTKVEKRDGLHRLIKDAELGKIDLILTKSISRFSRNTVDCLNLVRKLTDIGVTIFFEKENINTGDMESELLLSILSSLAESESYSHSENMKWANRKRMAKGIFKTVPPYGYQRKGADFYLIPDEAKVIEQIFKWALEGVSAYQVAKRLNEKNIFTRKGSKWQASGINNILHNIVYTGTMLHQRYFNDDQFRKKKNNGELPMYRIDNNHPPIISWEDYERVQELITLRANAKGTSKGSQKYSQRYAFTKRIICDKCGCNYKRVHTAGKGNTKVVKWSCTGHLKNKDGCDALPITDESLKTAYLTMLNKLILGHTIVLEPLINTPVEGKASKQELEKLSIEITKIDEKLEVLASLNASGVVSTKTALEEQGRLQMELNKLQEKQHKIMESVNGTSTQRIQLEQLHQFTKRSEMLTEWDEDLFLRFAERIVVYSRQEVSFELKCGLLLKERLEA

SEQ ID NO: 196 - protein, 461 aa, Artificial Sequence
  Synthetic
MNVAIYCRVSTLEQKEHGYSIEEQERKLKSFCEINDWTVADVFVDAGFSGAKRDRPELQRLMNGIKRFDLVLVYKLDRLTRNVRDLLDLLEIFEQNNVAFRSATEVYDTSTAMGRLFVTLVGAMAEWERETIRERTQMGKLAALKKGIMLTTPPFYYDRVDNKFVPNKYKEVVLFAYEEALKGKSSKSIARKLNNSDIPPPNNRKWEDRSITRALRSPFTRGHFEWGGVYLENNHEPIITEEMYEKVKDRLEERTNTKKIKHVSIFRSKLVCPVCDSKLTMNTHKVTLKDRVYYNKHYYCNNCKETPNLKPVYIRAEEVERVFYEYLQHQDLTQYEVVEDTEEKEVAIDINKVMQQRKRYHKLYANGLMNEDELAELIEETDAAIEEYKKQNENKEVKQYSDEDITEYKSLLLEMWNISSDEEKAEFIQMAIKNIFIEYVLGKNDNKKKRRSLKIKDIEFY

SEQ ID NO: 197 - protein, 543 aa, Artificial Sequence
  Synthetic
MSKARVYSYLRFSDPKQAAGSSADRQIEYARRWAAERNLELDDTLSLRDEGLSAYHQRHVKQGALGVFLSAAEGGRIAPGSVLIVEGLDRLSRAEPIQAQAQLAQIVNAGITVVTASDGKEYNRERLRSQPMDLVYSLLVMIRAHEESDTKSKRVKAALRRQCQQWIDGKWRGIIRSGRDPHWVEIRDGQFALVPERVAAVREALALFSRGHGKTKILRTLTERGLSMSNAGNHGTFIYRLVRNPMLMGTRVFEIDKEEFRLEGYYPALLSPEEFAVLQHLADERKGTRVKGEIPGLLTGLGITHCGYCGAAMVAQNYMGRARKADGTPQDGHRRLHCVSDSQNSGCVVAGSVSIVPIERAIMTFCADQMNLTKLVEGDDGSAAVAGRLALARQKARGLQAQLERLTTALLADDGNAPPATFLRRARELEEELSSERRAIESLEREVLASANTTAPAAADVWAKLTHGVLALDYESRVRARQLVADTFSRIVIFHAGFRPGEGTEKRIGIQLVAKHGNVRMLDVDRKSGDWRAAEDFDLRALT

SEQ ID NO: 198 - protein, 515 aa, Artificial Sequence
  Synthetic
MKTAIYLRKSRADLEAEARGEGETLAKHRTTLLKIAKEMNLNVLSVREEIVSGESLVKRPEMLALLEEIEDNKYDVVLCMDMDRLGRGGMKEQGIILETFKRSNTKIMTPRKTYDLNDEWDEEYSEFEAFMARKELKIITRRMQRGRVASVEAGNYLGTHAPFGYDIHRLNKRERTLTINSEEASVVRMIFDWYANEDMGANAIRSKLNDLGYKSKLGNEWNPYSILDILKNNVYIGKVTWQKRKEVKQPDAVKRSCARQDKSDWIIADGKHEPIIPESLFEQVQEKLNSRYHVPYNTNGIKNPLAGIIKCSKCGYSMVQRYPKNRKETMDCKHRGCENKSSYTELIEKRLLEALKEWYINYKADFEKHKQDDKLKETQVIQINEAALRKLEKELVDVQKQKSNLHDLLERGVYTVDMFLERSNVVSDRITEITSTMENLKKEIKTEIKKEKVKKDTIPQVEHVLDLYFKTDDPKKKNNLLKSVLEKAVYKKEKWQRLDDFELVLYPKLPQDGDI

SEQ ID NO: 199 - protein, 482 aa, Artificial Sequence
  Synthetic
MRTALYIRVSTEDQAREGYSIQAQKNKLEAYCVSQGWDIAGFYVDDGYSAKDLERPEMKRMIKHIKQGLIDCVLVYRLDRLTRSVLDLYKLLELFEKHNCKFKSATEVYDTTTAMGRMFITIVAALAQWERENLAERVRMGLQEKARQGKWVINKAPFGYDIDRESDTLVINEKEAAVVRKIFDLYISGKGMSKIAVELNKSQIHTKSGFGWSDSKIKYILKNPVYIGTMRYNYRVNQENYFEVKNAVPAIISEETFEKAQKIMNKRSKVHPKAATSEFIFSGIARCARCGGPLSGKHGYSKRKTKTHKLKTYYCYNRRYGLCDLPYMSERFIEQQFLKLIETIEIQDEILDDLQHNDEDSKERIKAIQNELKAIEKRRIKWQYAWANETISDEDFAQRMKEENEKEEELKKELEKIQPKQGEMMSIDKLKELAKDIRNNWEYMEPLEKKSLLQMIVKEMVIDKISLQPKPESVKIVDIKFY

SEQ ID NO: 200 - protein, 504 aa, Artificial Sequence
  Synthetic
MDNTSYIIKYVALYLRKSRGEEDIDLEKHRFILREMCVKHGWKYVEYVEIANSETIEYRPKFKSLLSDVEEGIYDAVLVVDYQRLGRGELEDQGKIKRIFRDSETYIVTPEKIYNLVDDTDDLLVDVRGLLARQEYKTTTKNLQRGKKIGARLGKWTNGPAPFPYVYTAAIKGLEVVPERNVIYQEMKSRVLGGESLEAIGWDFNRRGIPGPGPKKGLWHSNTIGRILISEVHLGKIISNKTKGSGHKKKKTQPLVINPREEWVVVENCHAAVKTEEEHMKLLAMLEKNQVVPNRAKAGTYALSGLVFCGKCKKMMRYNVRSDGYTTNSIKACNKYDHFGNYCTNSGVKVNILTDFIDREIIDYEQRIIDSDNYINTDVIEKLERIIREKEAQLTKLNRALSKIKEMYEMEEYTREEYEERKAKRQQEISALESELAVHRYEINYDSREKNKERMKLINSFKDIWSSESATEHDKNMIAKMIISRIEYIHDKGTNNLNISIQFN

SEQ ID NO: 201 - protein, 461 aa, Artificial Sequence
  Synthetic
MKVAIYTRVSTHEQSLHGFSIEEQERKLKQFCEFNDWKVYKIYTDAGYSGAKRDRPALNQLIQDVDKLDLVLVYKLDRLTRSVRDLLDILEILEKNDVSFRSATEVYDTSTAMGRLFVTLVGAMAEWERTTIQERTFMGRRAAAQKGLIKTTPPFFYDRVDNKFIPNEYSKVLRFAVDEIKKGTSLREITIKLNNSNYKPPIGNRWHRSVLRNALKSPVARGHYYFSDVFVENTHEPIISDEEYEEIRERISERTNSVVVRHTSVFRGKLVCPVCGNRCTLNTNKHVTQKRGTWYSKHYYCDRCKCDKSVENFNFSEEEVLKQFYTYISNFDLTNYEVEMAEEEEPEIEIDIDKINEERKRYHILFAKGLMREDELTPLIKDLDDMVAAYNKQIKENKIKVYDYEQIKNFKYSLLEGWERMDLELKAEFIKRAIKSIKIEYIKGVRGKRPNSINILDVDFY

SEQ ID NO: 202 - protein, 551 aa, Artificial Sequence
  Synthetic
MATKARVYSYLRFSDPKQAAGSSADRQLEYAKRWAAEHGMALDAALSMQDEGLSAYHQRHVTKGALGVFLAAIDEGRIPAGSVLIVEGLDRLSRAEPIQAQAQLAQIINAGITVVTASDGREYNRAGLKAQPMDLVYSLLVMIRAHEESDTKSKRVRAAIHRQCKGWQDGTWRGVIRNGKDPSWTRLDPETKAFQLVPERAEAVKLAIRMFRDGHGAVRIMRTLAEEGLQLTNGGNPAGQLYRILRNRALIGEKVLEIDGEEYRLAGYYPSLLSAEQFADLQQATEQRAKQKGTGEIPGLITGLRISYCGYCGSAMVAQNLMNRGRREDGGPQHGHRRLICVGNSQGMGCAVAGSCSVVPIEHAIMSYCADQMNLARLFEGGDRSEALAGKLAIARARVADTTAKVERITDAMLADDAGDAPAAFMRRARELETSLVEQQAEVDALEHELAAVASSPTPAVAKAWADLQEGVKALDYDARTKARQLVADTFERISIYHRGTEPEQTRSWKGTIDLVLVAKRGSARILHVDRQTGEWRGGEEVRDLPDDPIQ

SEQ ID NO: 203 - protein, 484 aa, Artificial Sequence
  Synthetic
MNKVAIYVRVSTTMQAEEGYSIDEQIDKLKSYCKIKDWTVYDIYKDGGFSGGNIKRPAMERLISDAKRKKFDTVLVYKLDRLSRSQKDTLFLIEEVFDKNDISFLSLNESFDTSTAFGKAMIGILSVFAQLEREQIKERMLLGKIGRAKTGKSMMFSKVSFGYTYDKLKDELVVNQAESIIVRKIFDAYLGGLSLNKLRDYLNNNGIYRGDKPWNYQGLRRILSNPVYIGMIRYREEIYPGNHKAIIDIDDYNKTQEEIKKRQIKALEFSNNPRPFRSKYMLSGIAKCGYCGTPLQIILGSKRKDGTRNMRYQCINRFPRNTKGVTIYNDGKKCESGFYEKADIEEFVINEIRSLQINYNKLDAMFDRHPTVNSDDIKKQIITLDNKLKRLNDLYINNMIELDDLKKQTQSLRKQKTILEDELLNNPAITQEKNKKHFKEMLATKDITKLDYETQKNIVNNLINKVFVKSGYIKIEWKIPFKKA

SEQ ID NO: 204 - protein, 471 aa, Artificial Sequence
  Synthetic
MRKVAIYSRVSTINQAEEGYSIQGQIEALTKYCEAMEWKIYKNYSDAGFSGGKLERPAITELIEDGKNNKFDTILVYKLDRLSRNVKDTLYLVKDVFTANNIHFVSLKENIDTSSAMGNLFLTLLSAIAEFEREQIKERMQFGVMNRAKSGKTTAWKTPPYGYRYNKDEKTLSVNELEAANVRQMFNMIISGCSIMSITNYARDNFVGNTWTYVKVKRILENETYKGLVKYREQTFSGDHQAIIDEKTYNKAQIALAHRTDTKTNTRPFQGKYMLSHIAKCGYCGAPLKVCTGRAKNDGTRRQTYVCVNKTESLARRSVNNYNNQKICNTGRYEKKHIEKYVIDVLYKLQHDKEYLKKIKKDDNIIDITPLKKEIEIIDKKINRLNDLYINDLIDLPKLKKDIEELNHLKDDYNKAIKLNYLDKKNEDSLGMLMDNIDIRKSSYDVQSRIVKQLIDRVEVTMDNIDIIFKF

SEQ ID NO: 205 - protein, 536 aa, Artificial Sequence
  Synthetic
MTDPTLTRSKKPAYIYARFSSLEQAKGFSLERQLTTARSYIERKGWQLAEELADEGRSAFKGSNRDEGAALFEFESRARSGHFKNGAVLVVESIDRLSRQGPKAAAQLIWSLNENGVDVASYHDDQVYRAGSGDMLEIFGLIIKASLAHEESDKKSKRAKASWEKKYGDIEAGSKKAITKQVPAWLTVTADNDIIENPARVKVVREIFEWYVEGIGLHTIMKRLNERGEPAFSGRETSKGWSKSAINHVLSNRAVLGEFATQQGKHIPVVYYPQVVSRDLFNRAEAMRATKTRTGGSSKYQGNNLFAGIAKCEVCDGPMGFVRDGGISRYTTASGEQRVYKSKGHNYLICDAARRGFGCDNKVHAPYATLEAATLQQLLWATIDDEEAQADPKADALRSKLDAVLHSIDLKNQQISNIIDSMAEAPSKAMAARVAALEAETDALGAECDELQKALAVQTSAPSLRDDIAQLRDLTELMNSEDEDVRRAARLRTNASLKRVIDHMTIDRAANVTVMSMDVGVWQFDKLGNRIGGQAL

SEQ ID NO: 206 - protein, 452 aa, Artificial Sequence
  Synthetic
MKAAIYIRVSTQEQVENYSIQAQTEKLTALCRSKDWDVYDIFIDGGYSGSNMNRPALNEMLSKLHEIDAVVVYRLDRLSRSQRDTITLIEEYFLKNNVEFVSLSETLDTSSPFGRAMIGILSVFAQLERETIRDRMVMGKIKRIEAGLPLTTAKGRTFGYDVIDTKLYINEEEAKQLRLIYDIFEEEQSITFLQKRLKKLGFKVRTYNRYNNWLTNDLYCGYVSYKDKVHVKGIHEPIISEEQFYRVQEIFARMGKNPNMNRDSASLLNNLVVCSKCGLGFVHRRKDTMSRGKKYHYRYYSCKTYKHTHELEKCGNKIWRADKLEELIIDRVNNYSFASRNVDKEDELDSLNEKLKTEHTKKKRLFDLYISGSYEVSELDAMMADIDAQINYYEAQIEANEELKKNKKIQENLADLATVDFDSLEFREKQLYLKSLINKIYIDGEQVTIEWL

SEQ ID NO: 207 - protein, 471 aa, Artificial Sequence
  Synthetic
MTVGIYIRVSTDEQVKEGFSISAQKEKLKAYCTAQGWEDFKFYVDEGKSAKDMHRPLLQEMITHIKKGLIDTVLVYKLDRLTRSVVDLHNLLSIFDEYNCAFKSATEVYDTSSAMGRFFITIISSVAQFERENTSERVSFGMAEKVRQGEYIPLAPFGYVKGPDGKLIVNEAEKEIFLHVVNMVSTGYSLRQTCEYLTNIGLKTRRSNDMWKVSTLIWMLKNPAVYGAIKWNNEIYENKHEPLIDKATFDKLANILSIRSKSTTSRRGHVHHVFKGRLICPQCGKRLSGLRTKYVNKNKETFYNNNYRCATCKEHRRPAIQISEQKIEKAFIDYISNYTLNKADISSKKLDNNLRKQEMIQKEIVSLQRKREKFQKAWAADLMSDDEFSKLMIDTKMEIDVAEDRKKEYDVSLFVSPEDIAKRNNILRELKINWTSLSPTEKTDFISMFIEGIEYVKNDENKAVITKIRFL

SEQ ID NO: 208 - protein, 476 aa, Artificial Sequence
  Synthetic
MTVGIYIRVSTEEQANEGYSISAQRERLKAFCLAQNWHDYKFYVDEGISGRDTKRPQLKKMMEDIKAGHINVLLVYRLDRLTRSVRDLHRILDELEKYSCTFRSATEFYDTSTAMGKMFITIIAAIAEWESANLGERVTMGQVEKARQGEWAAQPPYGFFKDDKHKLQIHKEEIKAVKLMVKKIREGMSFRQLAFYMDSTQYKPKRGYKWHVRTLLSLMHNPALYGAMYWKEQIYENTHQGIMTKEEFDQLQKIISSRQNYKSRNVSSHFVFQTKLICPDCGSRCTSERYTWKRKTDNAVEVRNSYRCQVCALNNPKSTPFSVREVKVDEALIEYMINFTVAPSEVVELNENDQLLDIKNNLRKIENQREKYQRAWANDLITDDEFKVRMDESRLQFDSLQNDLKNIEGEKYDVVDIERYIEITKTFNDNYLNLTQEERRTFIQTFIESVKVEIVEHTKGKGYRNQKIRIADVSFY

SEQ ID NO: 209 - protein, 463 aa, Artificial Sequence
  Synthetic
MTVGIYIRVSTEEQAREGFSISAQREKLKAYCVSQDWTDYKFYVDEGKSAKDTNRPYLKLMLDHIQQGLIDVVLVYRLDRLTRSVKDLYKLLDLFDKNNCIFRSATEVYDTGSATGRLFITLVAAMAQWERENLGERVSMGQVEKARQGEFSAPAPFGFRKQGETLIKDEKQGPILLDIIEKVKKGWSIRQVAKFLDESEHMPIRGYKWHIGTILSILHNPALYGAFRWKDEIYEDSHEGYITKEEFEELQEILYSRQNFKKREVKSNFIFQTKLVCPQCGNRLGCERSVYFRKKDQKNVESHHYRCQSCALNYKPAVGVSEKKIEKALLTYMKNVTFDLKPIVKEEKDDSLEIQNQIKKIERKREKFQKAWASDLMTDEEFAARMSETKNAYEELKKQLSEIQPNEDLTVDIKKAKKLVNEFKLNWSYLNHAEKREYVQSFIEKIEFEKKGLTPRIRNVSFY

SEQ ID NO: 210 - protein, 461 aa, Artificial Sequence
  Synthetic
MKVAIYTRVSTLEQKEKGHSIEEQERKLRAYSDINDWKIHKVYTDAGYSGAKKDRPALQEMLNEIDNFDLVLVYKLDRLTRSVKDLLEILELFENKNVLFRSATEVYDTTSAMGRLFVTLVGAMAEWERTTIQERTAMGRRASARKGLAKTVPPFYYDRVNDKFVPNEYKKVLRFAVEEAKKGTSLREITIKLNNSKYKAPLGKNWHRSVIGNALTSPVARGHLVFGDIFVENTHEAIISEEEYEEIKLRISEKTNSTIVKHNAIFRSKLLCPNCNQKLTLNTVKHTPKNKEVWYSKLYFCSNCKNTKNKNACNIDEGEVLKQFYSYLKQFDLTSYKIENQPKEIEDVGIDIEKLRKERARCQTLFIEGMMDKDEAFPIISRIDKEIHEYEKRKDNDKGKTFNYEKIKNFKYSLLNGWELMEDELKTEFIKMAIKNIHFEYVKGIKGKRQNSLKITGIEFY

SEQ ID NO: 211 - protein, 452 aa, Artificial Sequence
  Synthetic
MKAAIYIRVSTQEQVENYSIQAQTEKLTALCRSKDWDVYDIFIDGGYSGSNMNRPALNEMLSKLHEIDAVVVYRLDRLSRSQRDTITLIEEYFLKNNVEFVSLSETLDTSSPFGRAMIGILSVFAQLERETIRDRMVMGKIKRIEAGLPLTTAKGRTFGYDVIDTKLYINEEEAKQLQLIYDIFEEEQSITFLQKRLKKLGFKVRTYNRYNNWLTNDLYCGYVSYKDKVHVKGIHEPIISEEQFYRVQEIFARMGKNPNMNRDSASLLNNLVVCGKCGLGFVHRRKDTVSRGKKYHYRYYSCKTYKHTHELEKCGNKIWRADKLEELIIDRVNNYSFASRNVDKEDELDSLSEKLKIEHVKKKRLFDLYISGSYEVSELDAMMADIDAQINYYEAQIEANEELKKNKQIQENLADLATVDFDSLEFREKQLYLKSLINKIYIDGEQVTIEWL

SEQ ID NO: 212 - protein, 508 aa, Artificial Sequence
  Synthetic
MKKAIAYMRFSSPGQMSGDSLNRQRRLIAEWLKVNSDYYLDTITYEDLGLSAFKGKHAQSGAFSEFLDAIEHGYILPGTTLLVESLDRLSREKVGEAIERLKLILNHGIDVITLCDNTVYNIDSLNEPYSLIKAILIAQRANEESEIKSSRVKLSWKKKRQDALESGTIMTASCPRWLSLDDKRTAFVPDPDRVKTIELIFKLRMERRSLNAIAKYLNDHAVKNFSGKESAWGPSVIEKLLANKALIGICVPSYRARGKGISEIAGYYPRVISDDLFYAVQEIRLAPFGISNSSKNPMLINLLRTVMKCEACGNTMIVHAVSGSLHGYYVCPMRRLHRCDRPSIKRDLVDYNIINELLFNCSKIQPVENKKDANETLELKIIELQMKINNLIVALSVAPEVTAIAEKIRLLDKELRRALVSLKTLKSKAVSSLGDFHAIDLTSKNGRELCRTLAYKTFEKIIINTDNKTCDIYFMNGIVFKHYPLMKTISAQQAISTLKYMVDGEVYF

SEQ ID NO: 213 - protein, 520 aa, Artificial Sequence
  Synthetic
MKKITKIDELPQGQLPNTKLRVAAYARVSTDSDEQLESLKAQREHYERYIKSNPEWVFAGLYYDEGISGTKMEKRTELLRMIRDCKQGRIDFIITKSISRFARNTVDCLELVRKLIDIGVYIYFEKENLNTGDMESELMLSILSGFAAEESASISQNSKWSIQKRFQNGSYIGTPPYGYTNIDGEMVIVPEEAEIIKRIFSECLSGKGGGTIARGLNKDKIPARRGNHWSAGTVIDMLRNEKYMGDVLLQKTYTDSNYNRHPNTGEKDQYYYKDNHEPIISREDFAKAQDLIDERAKMKCKGVKKNVYLNRYALSGKIVCGECGRNFRRKTNYSAGRSYIAWSCIGHIEDKESCSMLFLRDGEIKATLTTMMNKLAFSHKLILEPLFKSISQIDEESDRERMDAIDKRMEQLMEERNTLITLMAKGFLEPALFNQERNVLDSEIKNLTTEKTNLVTNSTSGVLRANDIKDLIDYVSADNFNGEYTEELFEEFVENIIVNSRDELTFNLKCGLSLKEKVVR

SEQ ID NO: 214 - protein, 515 aa, Artificial Sequence
  Synthetic
MVIPARKRVGSTAAKEKIKKLRVAAYCRVSTETEEQNSSYEVQVAHYTEFIKKNTEWEFAGIFADDGISGTNTKKREEFNRMIAECMDGNIDMVITKSISRFARNTLDCLQYIRQLKDKNISVYFEKENINTMDAKGEVLLTIMASLAQQESQSLSQNVKLGLQYRYQQGKVQVNHKRFMGYSKDEDGNLIIVPEEAEIIKRIYREYLEGQSLVGIGQGLEKDGILTAAGKPRWRPESVKKILQNEKYIGDALLQKTVTVDFLTKKRVKNEGHVPQYYVENSHEAIIPKDLFLQVQEEIHRRRNIYTGADKNKRIYSSKYALSAITFCGDCGDIYRRTYWNIHGRKEFVWRCVTRIEQGPEVCKNRTVKEDELYGAVMTATNRLLAGGDNMIRTLEENIHAVIGDTTEYQISELNSLLEENQKELISLANKGKDYESLADEIDELREKRQTLLIEDASLSGENERINELIEFVRDNKYCTLRYDDTLVRKIIQNVTVYEDHFVIGFKSGIEIEVE

SEQ ID NO: 215 - protein, 452 aa, Artificial Sequence
  Synthetic
MKAAIYIRVSTQEQIENYSIQAQTEKLTALCRSKDWDVYDIFIDGGYSGSNMNRPALNEMLSKLHEIDAVVVYRLDRLSRSQRDTITLIEEYFLKNNVEFVSLSETLDTSSPFGRAMIGILSVFAQLERETIRDRMVMGKIKRIEAGLPLTTAKGRTFGYDVIDTKLYINEEEAKQLQMIYDIFEEEKSITTLQKRLKKLGFKVKSYSSYNNWLTNDLYCGYVSYADKVHTKGVHEPIISEEQFYRVQEIFSRMGKNPNMNRDSASLLNNLIVCGKCGLGFVHRRKDTVSRGKKYHYRYYSCKTYKHTHELEKCGNKIWRADKLEELIIDRVNNYSFASRNVDKEDELDSLNEKLKTEHTKKKRLFDLYISGSYEVSELDGMMADIDARINYYEAQIEANEELKKNKKIQENLADLATVDFDSLEFREKQLYLKSLINKIYIDGEQVTIEWL

SEQ ID NO: 216 - protein, 460 aa, Artificial Sequence
  Synthetic
MKVAIYTRVSSAEQANEGYSIHEQKKKLISYCEIHDWNEYKVFTDAGISGGSMKRPALQNLMKQLSYFDLVLVYKLDRLTRNVRDLLDMLEEFEQYNVSFKSATEVFDTTSAIGKLFITMVGAMAEWERETIRERSLFGSRAAVREGNYIREAPFCYDNIEGKLHPNEHAKVIDLIVSMFKKGISANEIARRLNSSKVHVPNKKSWNRNSLIRLMRSPVLRGHTKYGDMLIENTHEPVLSEHDYNAINDAISSKTHKSKVKHHAIFRGALVCPQCNRRLHLYAGTVKDRKGYKYDVRRYKCETCSKNKDVKNVSFNESEVENKFINLLKSYELNKFHIRKVEPVKKIEYDIDKINKQKINYTRSWSLGYIEDDEYFELMEEINATKKMIEEQTTENKQSVSKEQIQSINNFILKGWEELTIKDKEELILSTVDKIEFNFIPKDKKHKTNTLDINSIHFKF

SEQ ID NO: 217 - protein, 465 aa, Artificial Sequence
  Synthetic
MKVAIYTRVSSYEQATEGYSIHEQERKLKAFCEVQNWHNFKVFTDAGVSGGSMNRPALKRIMDNLEYYDLVLVYKLDRLTRNVKDLLEMLEKFEKYNVAFKSATEVFDTTTAIGKLFITMVGAMAEWERATIRERALFGSRAAVREGNYIREAPFCYDNVDGKLVPNKHKWVIDYLVEQFKHGVSGNEIARQMNLKKVNVPKVKKWNRTSIIRLMKNPVLRGHTKYGDMYIENTHEPVLSESDYKRIIDVIENKTHRSKVKHHAIFRGVLTCPQCHNKLHLYAGKITDKKGYSYEVRRYKCDTCSKDKNVQTISFNESEVEDKFIELLKTYDMNKFKVDIVEESTPKLDYDIDKIMKQREKLTRSWSLGYIEDDEYFSLMDETKEILDEVERGGTEVESTQTVTNEQLNMIDDILIKGWSKLNVEQKEELILSTVKEIAFDFVPRKDNESGKVNTLNIREITFKF

SEQ ID NO: 218 - protein, 534 aa, Artificial Sequence
  Synthetic
MKAAIYSRKSKFTGKGESIENQIEMCKKYASDNEYDEIFIYEDEGFSGGNINRPEFKQMMKDAKSHKFDVIICYRLDRISRNVSDFSTLIDKLKLLNIGFISIKEQFDTTSPMGTAMMFISSVFAQLERETIAERIKDNMYELAKTGRWLGGTPPFGFISEQSLYSDTNGKQKKMFQLAPVGSECELIKYMYEKYLALGSLGKLQKHLSSKEIKTRNNATWDIKALQLILRNPVYVKSDEVVLSYLESKGAKVFGEVNGNGILSYNKKDSKDKYKDISEWILSVAKHNGLIDSSLWLLVQKKLDKNKSLAPRLVSNDSSGLLSRVLYCKKCGGKMIQKKGHTSVKTKEPFRYYVCLNKMNFKSCDSKNIRADILEKHVADKIIEETSDTGSLIKAIDDYKNKLQLDSGKSNNLNFIKKQILLKQTQINNLMENISKNPKLFDLFNSKIEELNSELKSLKFKKFEAESVKENTSNALKEIDASTQMLLNFKRLWMYADSSTKKLLIENIVDSVCYDADNKTADVKLICCKKKGAL

SEQ ID NO: 219 - protein, 452 aa, Artificial Sequence
  Synthetic
MKAAIYIRVSTQEQIENYSIQAQTEKLTALCRSKDWDVYDIFIDGGYSGSNMNRPALNEMLSKLHEIDAVVVYRLDRLSRSQRDTITLIEEYFLKNNVEFVSLSETLDTSSPFGRAMIGILSVFAQLERETIRDRMVMGKIKRIEAGLPLTTAKGRTFGYDVIDTKLYINEEEAKQLQMIYDIFEEEKSITTLQKRLKKLGFKVKSYSSYNNWLTNDLYCGYVSYADKVHTKGVHEPIISEEQFYRVQEIFSRMGKNPNMNRDSASLLNNLVVCGKCGLGFVHRRKDTVSRGKKYHYRYYSCKTYKHTHELEKCGNKIWRADKLEELIIDRVNNYSFASRNVDKEDELDNLNEKLKTEHTKKKRLFDLYISGSYEVSELDAMMADIDAQINYYEAQIEANEELKKNKKIQENLADLATVDFDSLEFREKQLYLKSLINKIYIDGEQVTIEWL

SEQ ID NO: 220 - protein, 452 aa, Artificial Sequence
  Synthetic
MKAAIYIRVSTQEQIENYSIQAQTEKLTALCRSKDWDVYDIFIDGGYSGSNMKRPALNEMLSKLHEIDAVVVYRLDRLSRSQRDTITLIEEYFLKNNVEFVSLSETLDTSSPFGRAMIGILSVFAQLERETIRDRMVMGKIKRIEAGLPLTTAKGRTFGYDVIDTKLYINEEEAKQLQMIYDIFEEEKSITTLQKRLKKLGFKVKSYSSYNNWLTNDLYCGYVSYADKVHTKGVHEPIISEEQFYRVQEIFSRMGKNPNMNRDSASLLNNLVVCGKCGLGYVHRRKDTVSRGKKYHYRYYSCKTYKHTHELEKCGNKIWRADKLEELIIDRVNNYSFASRNVDKEDELDSLNEKLKTEHAKKKRLFDLYISGSYEVSELDGMMADIDAQINYYEAQIEANEELKKNKKIQENLADLATVDFDSLEFREKQLYLKSLINKIYIDGEQVTIEWL

SEQ ID NO: 221 - protein, 458 aa, Artificial Sequence
  Synthetic
MNYERRYLRSCQVSTLEQKEHGYSIEEQERKLKSFCEINDWSVSDVFIDAGFSGAKRERPELQRMMNDIKRFDLVLVYKLDRLTRNVRDLLDLLEIFEQNNVAFRSATEVYDTSTAMGRLFVTLVGAMAEWERETIRERVMMGKRAAIKQGMILTPPPFYYDRVDNTYIPNDYKKVVLWAYDEVMKGNSSKAIARKLNDSDIPPPNGKRWEDRTITRALRSPITRGHYTWGDVFIENSHEPIITEEMYQQIKERLEERINTKIVSHVSVFRGKFICPRCGGTLTLNTVTRKRKKGYVTYKTYYCNTCKAKKQSFGFSENEALRVFRDYLSKLDLEKYEVKTKQKDDVVTIDIDKIMEQRKRYHKLYAKGLMKEEELFGLIKETDETIAEYEKQKELVPRKSLDIDKIKKFKNALLESWEIFSLEDKADFIKMAIKSIDIDYVKLKNRHSIKINDIEFY

SEQ ID NO: 222 - protein, 511 aa, Artificial Sequence
  Synthetic
MENKIKCGIYARVSTDRQGDSIENQVGQGTEYIKRLGDEYDTENIEVFRDEAVSGYYTSVFDRAEMKRAIEYAREKKIQLLVFKEVSRVGRDKQENPAIIGMFEQYGVRVIAINDNYDSMNKDNITFDILSVLSEQESRKTSVRVSTARKQKAARGQWNGEPPYGYIVNPETKRLEIHEERGKIPPLVFDLYVNRGMGTFKVAEYLNKKGYVTKNGKLWSRETVNRLIRNQAYIGQVAYGTRRNVLKREYDERGAMTKKKVQIKINRQEWQIVEDAHPALVDKELFYKAQKILMSRTHERGGAKRAHHPLTGVLVCGSCGEGMVCQKRSFKDKEYRYYICKTYHKYGREACSQANINADDIERAVVEAVRNKISRLPADTLLITADREQDIKKLTSELKDNNSRRDKLMKDQLDIFEQRELFPDDLYRSKMIEIKNSIAHLEEEKEIIEKQIEGIKEKITESSSLQHIIEEFKELDIEDVGRLRVLIHETVGSITVKGDNLRIEYVYDFDS

SEQ ID NO: 223 - protein, 505 aa, Artificial Sequence
  Synthetic
MDRICIYLRKSRADEELEKTIGEGETLSKHRKALLKFAKEKKLNIVEIKEEIVSADSIFFRPKMIELLKEVETKRYIGVLVMDIQRLGRGDTEDQGIITRIFKESHTKIITPQKTYDLDDDLDEDYFEFESFMGRKEYKMIKKRMQGGRVRSVEDGNYIATNPPFGYDVHWINKSRTLKANSKESEIVKLIFKLYIKGNGAGTIAKHLNDLGYKTKFGNNFSNSSVIFILKNPVYIGKITWKKKDIKKSKDPNKVKDTRTRDKSEWIIADGKHKAIIDSNIWNKAQEILSNKYHIPYKLANPPANPLAGLVICSKCNGKMVMRKYGKKLPHLICTNTKCNNKSARFDYIEKAILEGLEEYLKNYKVNVKGNGKKANLKPYEQQLNALSKELIVLNEQKLKLFDFLEREVYTEEIFLERSKNLDERINTSTLAINKIKKILDDEKKKNNKNDIVKFEKILEGYKETKDIQKKNELMKSLIFKIEYKKEQHQRNDDFDIRLFPKLLR

SEQ ID NO: 224 - protein, 452 aa, Artificial Sequence
  Synthetic
MKAAIYIRVSTQEQIENYSIQAQTEKLTALCRSKDWDVYDIFIDGGYSGSNMNRPALNEMLSKLHEIDAVVVYRLDRLSRSQRDTITLIEEYFLKNNVEFVSLSETLDTSSPFGRAMIGILSVFAQLERETIRDRMVMGKIKRIEAGLPLTTAKGRTFGYDVIDTKLYINEEEAKQLQMIYDIFEEEKSITTLQKRLKKLGFKVKSYSSYNNWLTNDLYCGYVSYADKVHTKGVHEPIISEEQFYRVQEIFSRMGKNPNMNRDSASLLNNLVVCGKCGLGYVHRRKDTVSRGKKYHYRYYSCKTYKHTHELEKCGNKIWRADKLEELIIDRVNNYSFASRNVDKEDELDYLNEKLKIEHAKKKRLFDLYINGSYEVSELDSMMNDIDAQINYYESQIEANEELKKNKKIQENLADLATVDFDSLEFREKQLYLKSLINKIYIDDEQVTIEWL

SEQ ID NO: 225 - protein, 452 aa, Artificial Sequence
  Synthetic
MKAAIYIRVSTQEQIENYSIQAQTEKLTALCRSKDWDVYDIFIDGGYSGSNMKRPALNEMLSKLHEIDAVVVYRLDRLSRSQRDTITLIEEYFLKNNVEFVSLSETLDTSSPFGRAMIGILSVFAQLERETIRDRMVMGKIKRIEAGLPLTTAKGRTFGYDVIDTKLYINEEEAKQLRLIYDIFEEEQSITFLQKRLKKLGFKVRTYNRYNNWLTNDLYCGYVSYKDKVHVKGIHEPIISEEQFYRVQEIFSRMGKNPNMNKESASLLNNLVVCSKCGLGFVHRRKDTVSRGKKYHYRYYSCKTYKHTHELEKCGNKIWRADKLEELIIDRVNNYSFASRNIDKEDELDSLNEKLKIEHAKKKRLFDLYINGSYEVSELDSMMNDIDAQINYYESQIEANEELKKNKKIQENLADLATVDFNSLEFREKQLYLKSLINKIYIDDEQVTIEWL

SEQ ID NO: 226 - protein, 472 aa, Artificial Sequence
  Synthetic
MEDSSNKSVGIYVRVSTDEQAKEGFSISAQKEKLKAYCVSQGWANFKFYVDEGKSAKDTHRPSLELLLRHIEQGIIDTVLVYRLDRLTRSVRDLYTLLDYFDKYNAVFRSATEVYDTGSATGRLFITLVAAMAQWERENLGERVKMGQNEKARQGQFSAPAPFGFIKEGKSLVKNHEQGEILLEIIDKVKKGYSTRQIANYLDDSGLLPIRGYRWHPGTILTLLKNPILYGSFRWGDEIIEDTHEGYISKDEFDRIQEILKERSIVKKRDSYSVFIFQSKIVCAGCGNRLASERSKYFRKKDKQYVETNNYRCQTCAQNRKPSIMGSEKKFQKALVKYMQNVTPKLEPKIPEEKKHDYEKVHQKILNLEKQRKKYQKAWSLDLMTDEEFEQLMYETKEALKSAQNELAAAHSSDSQNSQIDIERAKEIVKMFNENWSVLTNEEKRSIVQELIKHINFTKEDGEIIITHIEFY

SEQ ID NO: 227 - protein, 470 aa, Artificial Sequence
  Synthetic
MSSVRRNQTPAITPKKRCAVYTRKSTDEGLDQEYNSLEAQRDAGLAFIASQRHEGWIAVDDGYDDGGYSGGNMERPGLRRLMIDIEAGKIDTVVVYKIDRLTRSLPDFAKLVDVFDRNGVSFVSVTQQFNTTTSMGRLTLNILLSFAQFEREVTGERIRDKIAASKAKGMWMGGVPPLGYDVVERKLVVNEREAVLVRDIFRRYAEHGSAARLVRELEIEGHTTKAWVTQSGRERLGRSIDQQYLFTLLRNRIYLGEICNHDTWYSAQHDPIISQELWDAAHAFIERRKQAPREHRAKHPALLAGLLFAPDGQRMLHSFVKKKNGRQYRYYVPYLHKRRNAGASLAPHTPDVGHLPAAEIEEAVLAQIHAALSSPQILIAVWRSCQQHPVGAALDEAQVVVAMQRIGDVWSQLFPAEQQRITRLLIERVQLHGHGLDIVWREDGWIGFGADISTHPLIEESQERVEEVWA

SEQ ID NO: 228 - protein, 521 aa, Artificial Sequence
  Synthetic
MQAEEFSIPGADQPPTFRAAEYVRMSTEHQQYSTENQADKIREYAARRNIEIVRTYADEGKSGLRIDGRRALQQLIKDVETGSADFQIILVYDVSRWGRFQDADESAYYEYICRRAGIQVAYCAEQFENDGSPVSTIVKGVKRAMAGEYSRELSAKVFAGQCRLIELGFRQGGPAGYGLRRVLVDQSGTLKGELARGEHKSLQTDRVILQPGPDDEVAVVNQIYRWFVADNMTELDIAERLNAQGTRTDLGRDWTRATIREVLSNEKYIGNNIYNRRSFKLKKHRVVNSPEMWIKKEGAFEGIVPPELFYTAQGILRARAHRYSDEELIEKLRNLYQRHGYLSGLIIDEAEGMPSSAAYAHRFGSLIRAYQTVGFTPDRDYQYLEANQFLRRLHPEIVGQTERMIAEVGGMVERDPATDLLTVNREFTVSLVLARCQLLDNGRRRWKVRFDTSLAPDITVAVRLDDSNQAALDYYLLPRLDFGQARIHLADHNGIEFECYRFDSLDYLYGMARRIRIRRAA

SEQ ID NO: 229 - protein, 452 aa, Artificial Sequence
  Synthetic
MKAAIYIRVSTQEQIENYSIQAQTEKLTALCRSKDWDVYDIFIDGGYSGSNMNRPALNEMLSKLHEIDAVVVYRLDRLSRSQRDTITLIEEYFLKNNVEFVSLSETLDTSSPFGRAMIGILSVFAQLERETIRDRMVMGKIKRIEAGLPLTTAKGRTFGYDVIDTKLYINEEEAKQLQMIYDIFEEEKSITSLQKRLKKLGFKVKSYSSYNNWLTNDLYCGYVSYADKVHTKGVHEPIISEEQFYRVQEIFSRMGKNPNMNRDSASLLNNLVVCSKCGLGFVHRRKDTVSRGKKYHYRYYSCKTYKHTHELEKCGNKIWRADKLEELIIDRVNNYSFASRNVDKEDELDNLNEKLKTEHTKKKRLFDLYISGSYEVSELDAMMADIDAQINYYEAQIEANEELKKNKKIQENLADLATVDFNSLEFREKQLYLKSLINKIYIDGEQVTIEWL

SEQ ID NO: 230 - protein, 543 aa, Artificial Sequence
  Synthetic
MGKNGARVYSYLRFSDPRQATGSSADRQLAYASAWASKHGMELDATLTLRDEGLSAYHETHVKQGALGAFLRAVDEGRIPAGSVLIVEGLDRLSRAEPLLAQAQLGQIVNAGITVVTASDGREYNREGLKAEPMNLVYSLLVMIRAHEESDTKSKRVKAAVRRQCEGWVTGSYRGRIVSGKDPQWLAWDGDSWQFIPERVEAVRFALDAYRSGIGAARLVRLMHEKGMVLSDWGIAAQQVYRLVRLPALRGAKRISIDGEDFMLEDYYPRLLSDEEFSELETLVGQRYRRRGKDEIVGIVTGIGITRCGYCGTALVAQNLMQRVKSDGSLEDGHRRLHCVSYSKNGGCNGGSCSSVPIERAVLAYCSDQMNLQRLLEPSSAGEDLRPRLVEAKKGVAEIERQLERVTDALLADDTGAAPMAFVRKARELEEDLERRRSAVRALEQELVTKSASTPAAGASKWAELAERAKSMTDVEAREQARQLVMDTFETLVVYMRGVMPTPKGRHIDLMMRSRAGQTRWLRVDRRSGVWRESGDSSRRLEG

SEQ ID NO: 231 - protein, 500 aa, Artificial Sequence
  Synthetic
MKMKSVLYARVSTEDLEQNNSYIQQQLYQDDRFEIVKIFSDKASGSSVDGRESFLEMLKYVGISKEGNNYFVEHRTEIECIIVANVSRFSRSVVDARLIIDALHKNNVKVFFVDLNKFSDDADIFLQLNMYLMIEEQYLRDVSKKVKAGMQRKQSTGYILGSNKIWGYNYVTKDDGKGYLVPHETESLMVKNIFKEYITGAGTRTLAKKYKLSSSTILGILKNTKYCGYMGYNLKSDNPTYVKSPFIEPLISTEAFEEVQRIIKGRCNSESGRGRRIKVRNLTGKIKCECGANYHYKQRETEWCCGREGVEGRTKGCGSPQFNTKLIIPYLEKNMDNIEKNLQFNLNREIKDINVGSFDRLNQRKEELIRQQDKLLDLYLDEDKLKNISKEMLERRSKLIKEEIEEVEEKLVILNDVNSHLNNLRRIKVEYKNEIKNIRRLIEEKNLDEIEKLISKIQLETIVNIINFRKELRIKEIQFSCFNELYNTNFIFAPEPKKVK

SEQ ID NO: 232 - protein, 550 aa, Artificial Sequence
  Synthetic
MNNKVAIYVRVSTHHQIDKDSLPLQRQDLINYTKYVLNINEYELFEDAGYSAKNTDRPNFQNMMTKIRNNEFSHLLVWKIDRISRNLLDFCDMYEELKKYNCTFVSKNEQFDTSSAMGEAMLKIILVFAELERKLTGERVTAVMLDRASKGLWNGAPIPLGYVWDKVKKFPIIDRTEKSTIELIYNTYLKAKSTTEVRGLLNANGIKTKRGGSWTTKTVSDIIRNPFYKGTYRYNYKEPGRGKIKNKNEWIVIEDNHPGIIEKELWKKCNEIMDVNAQRNNASGFRANGKVHVFAGILECGECYKNLYAKQDKPNIEGFRPSIYVCSGRYNHLGCSQKTISDNYVGTFIFNFISNILTVQRKIKKLDLEVLEKTLIKGKAFTNVVGIENIEVLQQLSYSESTFKSKNIEDKENSFELEVIKKEKSKYERALERLEDLYLFDDESMSEKDYVLKKNKINEKLNDANEKLRKIDNYNDISELNLEKEASDFMLSKQLLNTECINYKNLVLNVGRDILKEFVNTIIDKIIVKDKKISSVKFKSGLVIKFVYKC

SEQ ID NO: 233 - protein, 505 aa, Artificial Sequence
  Synthetic
MNVAIYLRKSRADEEAEKQGEFETLSRHKSTLLKLAKEQNLDVIEIKEELVSGESIIHRPKMLELLKEVEENKYDAVLVMDLDRLGRGDMKDQGIILETFKESKTKIITPRKTYDLTDEFDEEYSEFEAFMARKELKLISRRMQRGRIKSVEEGNFIGTSAPFGYDAVTTGRKERILVPNKDADVVRTIFDLYINEDMGCSKISKYLNNLGIKTATGANWYNSAITNIIKNKVYCGYIQWQKKDYKKSKNPNKIKTVKLRPKDEWIEAKGKHEPLISEITWKKAQNILKKNGHVSYGNQIKNPLAGIVICKNCARPLVYRPYADHDYIICYHPGCNKSSRFEFIEAAILKSLEDTVKKYQLKASDLDLDKNNKDSNIEFQKRVLKGLETELKELGKQKNKLYDLLERGIYDEDTFIERSNNISSRTEEIKDSINTVKNRLSTVKKDNSKIIEDIKTVLSLYHDSDSLGKNKLLKSVIDKAVYYKSKEQKLDSFELMVHLKLHEDQ

SEQ ID NO: 234 - protein, 455 aa, Artificial Sequence
  Synthetic
MSVIVTKKRCAVYTRVSTDERLDQSFNSLDAQREAGQAYIAAQRHEGWLPVDDDYDDGGYSGGNMERPALKRLLALIATDQIDVVVVYKIDRLTRSLVDFARLIEAFERHKVSFVSVTQQFNTTTSMGRLMLNILLSFAQFEREVTGERIRDKIAASKRKGMWMGGYPPLGYDLKDRKLFVNEREAPTVQRIFERFAALGSVTELCRELAQDGVKTKAWQTRDGRMRNGTVMDKQYLSKALRNPVYVGEIRHKNVVHAGQHTPIISRQLWDRVQAILAADADQRAGMTRTRGKCDALLRGLLFGPNGEKYYPTFTKKASGKRYRYYYPQSDKKYGFGSSALGMLPADQIEEVVVNLVIQALQSPESMQAVWDHVRQNHPEIDEPTTVLAMRQLGEVWKQLFPEEQVRLINLLIERIDVLPDGIDIAWREIGWKELAGELAPDTIGSEMLEVERSQ

SEQ ID NO: 235 - protein, 470 aa, Artificial Sequence
  Synthetic
MKGESELDKKAAIYIRVSTQEQATEGYSIQAQTDRLTKYVEAKDFILYKKYIDAGYSASKLERPAMQELIQDVQSKKVDVVIVYKLDRLSRSQKDTMYLIEDIFRPNDVELISMQESFDTSTAFGSATVGMLSVFAQLERKSISERMITGRVERAKKGFYHTGGQDRPPAGYQFNSDNHLIINEYEAAAIKDLFRLYNDGLGKSSISEYLKKNYPGKNKWLPSSIDRMLKNSLYIGKVKFSGVEYDGIHEPIIDEVTFYKTQKEIARRKQSNTKRYNYVALLGGLCECGICGAKMANRRAVGRKGKVYRYYRCYSKKGSPKHMMKTDGCSSKAQQQFIIDEAVINNLKNIDVEAELKRRSAPQTNTSLISSQIESIDKQINKLIDLFQVDSMPLDVISEKIDKLNKEKQSMEKLLERKNRLDKTELQHRFDVLKSFDWDNSSIESKRVVIEMLVQKVIIHDNSIEIILVE

SEQ ID NO: 236 - protein, 517 aa, Artificial Sequence
  Synthetic
MKTIHKLARPQLPEPPKLKVAAYARVSTSSNEQLASLQTQITHYENHIQNNDQWEYVGVYYDEGISGTKVEKRDGLHRLIKDAELGKIDLILTKSISRFSRNTVDCLNLVRKLTDIGVTIFFEKENINTGDMESELLLSILSSLAESESYSHSENMKWANRKRMAKGIFKTVPPYGYQRKGADFYLIPDEAKVIEQIFKWALEGVSAYQVAKRLNEKNIFTRKGSKWQASGINNILHNIVYTGTMLHQRYFNDDQFRKKKNNGELPMYRIDNNHPPIISWEDYERVQELITLRANAKGTSKGSQKYSQRYAFTKRIICDKCGCNYKRVHTAGKGNTKVVKWSCTGHLKNKDGCDALPITDESLKTAYLTMLNKLILGHTIVLEPLINTPVEGKASKQELEKLSIEITKIDEKLEVLASLNASGVVSTKTSLEEQGRLQMELNKLQEKQHKIMESVNGTSTQRIQLEQLHQFTKRSEMLTEWDEDLFLRFAERIVVYSRQEVSFELKCGLLLKERLEA

SEQ ID NO: 237 - protein, 461 aa, Artificial Sequence
  Synthetic
MKVAIYCRVSTLEQKEHGYSIEEQERKLRSYCDINDWNVKDVYVDAGFSGAKRDRPELQRMMNDIKRFDLVLVYKLDRLTRNVRDLLDLLEIFEQNNVAFRSATEVYDTSTAMGRLFVTLVGAMAEWERETIRERTQMGKLAALKKGIMLTTPPFYYDRVDNKFVPNKYKEVVLFAYEEALKGKSAKSIARKLNNSDIPPPNNRKWEDRSITRALRSPFTRGHFEWGGVYLENNHEPIITEEMYEKVKDRLEERTNTKKIKHVSIFRSKLVCPVCDSKLTMNTHKVTLKDRVYYNKHYYCNNCKETPNLKPVYIRSEEVERVFYEYLQHQDLTEYDIVEDKEEKEVAIDINKVMQQRKRYHKLYANGLMNEDELAELIEETDIAIEEYKKQSENEEVKQYDTEDIKQYKNLLLEMWDISSDEEKAEFIQMAIKNIFIEYVLGKNDNKKKRRSLKIKDIEFY

SEQ ID NO: 238 - protein, 515 aa, Artificial Sequence
  Synthetic
MKTAIYLRKSRADLEAEARGEGETLAKHRSTLLKIAKEMNLNVLAVREEIVSGESLVKRPEMLALLEEIEDNKYDVVLCMDMDRLGRGGMKEQGIILETFKRSNTKIMTPRKTYDLNDEWDEEYSEFEAFMARKELKIITRRMQRGRIASVEAGNYLGTHAPFGYDIHRLNKRERTLTMDPEEASVVRMIFDWYANEDMGASAIRNKLNDLGYKSKLGNEWNPYSILDILKNNVYIGKVTWQKRKEVKRPDAVKRSCARQDKSDWIIADGKHEPIIPESLFEQVQEKLNSRYHVPYNTNGIKNPLAGIIKCSKCGYSMVQRYPKNRKETMDCKHRGCENKSSYTELIEKRLLEALKEWYINYKADFEAHKQGDKLKETQVIQMNEAALRKLEKELVDVQKQKNNLHDLLERGVYTVDMFLERSQVISDRINEITSTMENLKKEIKTEIKKEKVKKDTIPQVEHVLDLYFKTDDPKKKNSLLKSVLEKAVYKKEKWQRLDDFELVLYPKLPQDGDI

SEQ ID NO: 239 - protein, 489 aa, Artificial Sequence
  Synthetic
MKQIAIYIRKSVKGDENSISLEAQTEIIKHYFKGENNFIIYKDDGFSGGNTNRPAFQKLMADAVENKFDTIACYKLDRIARNTLDFLTTFNLLKEYNIDLICVEDKYDPSTPAGRLMMTLLASLAEMERENIKQRVSDSMLNLAKQGRWTGGTPPFGYKVITLDGGKYLEIEDKNNIKYIFNEFINGKSIIKLGNEFNCNKKKISRILHNITYLQSSKDASIYLKQILGYEVIGESNGYGYLPYGNYKVVNGKKIKNTDGLKIACISRHEAIIDLNTFIKVQEKLKTFEGKKAPRISTKSFLAQMVQCTCGSNMLIVLGHKKKDGSRKLYFSCPNKCGNNFATVKEIEDDTLTVLKNVDFFNKIRQNNTNLNKDNSKIKSTILKELEEKKKLLDGLVNKLALVDSSLANVLIEKMESLNIDIKNLQNKIDLLEKEEIASSYNKEDFNLKEESRKHFIEQFENMDTKERQNAIRGVINKIIWTGKNIIIS

SEQ ID NO: 240 - protein, 578 aa, Artificial Sequence
  Synthetic
MGEETDYNPADWIDLFCRKSQAVKSKASRGRKQELSISAQETLGRRVAALLGKQVRHVWKEVGSASRFRRKGARTDQDQALAAVVKGEVGALWCYRLDRWDRRGAGAILHIIEPEDGIPRRILFGWNEETGRPELDSSNKRDRGELIRSAERAREETEVLSERIKNTKDHQRANGEWVNARAPYGLEVVLVETLDEEGDLYDERRLRVSAELSGDPKGRTKAEIARLWHTLPVTDGLSLRSIAERLSDEGVPNPSGTAGWAFATGRDIINNPAYAGWQTTGRQEGQNQRRRVFRDENGDKLSVMAGEALVTDEEQLAAKEAVQGEEGIGVPNDGSEHSVKAKHLMTDASYCESCEGSMPWAGTGYGCWKTKSGQRAACEKPAFVARKAAEEYIGKRWQDRLIHAEPDDPILIEVAKRYRAAKNPKTSEHESEVLDALARAETALKRVWADRKGGLYDGPSEEFFKPDLDEATERVTAIQSELERVRGGSNKVDVSWIFDPDLVRHTWERADEKTRRMLLRLAIDEIWISKAAYQGQPFDGDSRITINWHGESPARRRVKTRKLPSGKVVPLIRPQKGK

SEQ ID NO: 241 - protein, 438 aa, Artificial Sequence
  Synthetic
MKVAAYCRVSTDQEEQLSSYENQVNYYREFISKHEDYELVDIYADEGISATNTKKRDAFNRLIQDCRAGKVDRILVKSISRFARNTLDCIKYVRELKELGVGVSFEKENIDSLDSKGEVLLTILSSLAQDESRSISENATWGIRKKFERGEVRVNTTKFMGYDKDDNGRLIINPQQAETVKFIYEKFLDGYSPESIAKYLNDNEIPGWTGKANWYPSAIQKMLQNEKYKGDALLQKTITVDFLTKKRVQNDGQVNQYYVENSHEAIIDKDTWELVQLELERRKAYREEHQLKSYIMQNDDNPFTTKVFCAECGSAFGRKNWATSRGKRKVWQCNNRYRVKGQIGCQNNHIDEETLEKAVVIAVELLSENVDLLHGKWNKILEENRPLEKHYCTKLAEMINKTSWEFDSYEMCQVLDSITISEDGQISVKFLEGTEVDL

SEQ ID NO: 242 - protein, 436 aa, Artificial Sequence
  Synthetic
MNVAAYCRVSTDQDEQLSSYENQVNYYRDYISKHEDYELVDIYADEGISATNTKKRDAFNRLIQDCRAGKVDRILVKSISRFARNTLDCIKYVRELKDLGIGVTFEKENIDSLDSKGEVLLTILSSLAQDESRSISENATWGIRKRFERGEVRVNTTKFMGYDKDKDGNLIINREQAKVVRYIYEQFLKGYTPESIARDLNDQEVPGWSGKANWYPSSILKMLQNEKYKGDALLQKTYTVDFLTKKRTENDGQVNQFYVANNHEGIIDHEMWETVQLEIARRKAFREEHGIPFYHLQNEDNPFMTKVFCAECGDAFGRKNWTTSRGKRKVWQCNNRYRVTGVMGCSNNHIDEEMLEKAFMKAVSILNDHKTDVLDKLERLSKGDNLLHKHYAKFMNQLLDLDHFDSTIMCEILDNITISESGEIRISFLEGTQVDL

SEQ ID NO: 243 - protein, 452 aa, Artificial Sequence
  Synthetic
MKAAIYIRVSTQEQIENYSIQAQTEKLTALCRSKDWDVYDIFIDGGYSGSNMNRPALNEMLSKLHEIDAVVVYRLDRLSRSQRDTITLIEEYFLKNNVEFVSLSETLDTSSPFGRAMIGILSVFAQLERETIRDRMVMGKIKRIEAGLPLTTAKGRTFGYDVIDTKLYINEEEAKQLRLIYDIFEEEQSITFLQKRLKKLGFKVRTYNRYNNWLTNDLYCGYVSYKDKVHVKGIHEPIISEEQFYRVQEIFARMGKNPNMNRDSASLLNNLVVCGKCGLGFVHRRKDTVSRGKKYHYRYYSCKTYKHTHELEKCGNKIWRADKLEELIIDRVNNYSFASRNVDKEDELDSLSEKLKIEHVKKKRLFDLYISGSYEVSELDAMMADIDAQINYYEAQIEANEELKKNKQIQENLADLATVDFDSLEFREKQLYLKSLINKIYIDGEQVTIEWL

SEQ ID NO: 244 - protein, 438 aa, Artificial Sequence
  Synthetic
MKVAAYCRVSTDQEEQLSSYENQVNYYRDYISKHEDYELVDIYADEGISATNTKKRDAFNRLIQDCRAGKVDRILVKSISRFARNTLDCIKYVRELKELGVGVTFEKENIDSLDSKGEVLLTILSSLAQDESRSISENATWGIRKKFERGEVRVNTTKFMGYDKDENGRLIINPGQAETVKFIYEKFLEGYSPESIAKYLNDNEIPGWTGKANWYPSAIQKMLQNEKYKGDALLQKTFTVDFLTKKRVQNDGQVNQYYVENSHEAIIDKDTWELVQLELARRKDFREEHQLKAYIIQNDDNPFTTKVFCKACGSAFGRKNWTTSRGKRKVWQCNNRYRVKGQIGCQNNHIDEETLEKAVVMAVELLSENVDLLHGKWNKILEENRPLEKHYCTKLAEMINKPLWEFDSYEMCQVLDSITISEDGQISAKFLEGTEVDL

SEQ ID NO: 245 - protein, 489 aa, Artificial Sequence
  Synthetic
MIIYLNKIILGGSSLTTGIYIRVSTEEQAKEGYSIANQKEKLIAFCESQGWSSYKIYSDEGYSAKDMKRPALQEMFNDMTQGVIKIILVYKLDRLTRSVRDLYTMLETFDKHDCKFKSATEVYDTTTAMGRLFITLVAALAQWERENTAERVRVVMENNVKNGKWKGGTLAYGYQLKNGNIVINEDEAATVSFIFNKIKFTGPLAIVRELIKKNIPTRTGSDWHVDTIRGIITNPFYIGYQRFNDSLKQYKGSVKQQKLYKSSHESIISEDEFWEVQEILNARKTHGSKKSTSTYYFSTVLTCGVCGASMCGHLSGNKKTYRCNKKKTSGNCDSSLILESTIVNWLLTNLESISKMLINNTITNTKGTITKEKHVNDFQKELKKITKLKEKHKTMYENDIIDIAELIEQTNKYRHREKEIKEIIHNIDKQDEKNEILKATLYNFNDAWAAATEPERKFLINSIFQNISIHAIGVHTRTKPRDIVISSIY

SEQ ID NO: 246 - protein, 452 aa, Artificial Sequence
  Synthetic
MKAAIYIRVSTQEQIENYSIQAQTEKLTALCRSKDWDVYDIFIDGGYSGSNMNRPALNEMLSKLHEIDAVVVYRLDRLSRSQRDTITLIEEYFLKNNVEFVSLSETLDTSSPFGRAMIGILSVFAQLERETIRDRMVMGKIKRIEAGLPLTTAKGRTFGYDVIDTKLYINEEEAKQLQMIYDIFEEEKSITSLQKRLKKLGFKVKSYSSYNNWLTNDLYCGYVSYADKVHTKGVHEPIISEEQFYRVQEIFSRMGKNPNMNRDSASLLNNLVVCGKCGLGFVHRRKDTVSRGKKYHYRYYSCKTYKHTHELEKCGNKIWRADKLEELIIDRVNNYSFASRNVDKEDELDSLNEKLKIEHTKKKRLFDLYISGSYEVSELDAMMSDIDAQINYYEAQIEANEELKKNKKIQENLADLATVDFNSLEFREKQLYLKSLINKIYIDDEQVTIEWL

SEQ ID NO: 247 - protein, 490 aa, Artificial Sequence
  Synthetic
MVIVAYAVYVRVSSDKDEQVSSVENQIDICRYWLENNGFEWDENAVYFDDGISGTAWLERHAIQLVLEKARKKEIDTVVFKSIHRLARDLKDALEIKEILLGHGVRLITIEEGYDSHYEGKNDMKFEMYAMFASQLPKTLSVSITAALAAKVRRGGYTGGFVPYGYEIIDGKYAINEEEAALVREIFELYAQGFGYIKIANTINDKGARTRKGAPWTFSTLSKMIKNPAYKGTYIMQKYGTVKVNGRKKKVINPKEKWVIFEGHHPAIISHELWEKVNNKDPNKFKKKRRVSTTNELRGITVCAHCGTAMSKRNSINVSKNGRETEYSYMICNWSRITARRECVRHVPIHYKDLRALVLSKLKEKERELDKEFCSDENQLQVKLRKLKKDINDLKFKRERLLDLYLEDERIDKDTFTIRNAKIEKEIGLKEMEIRKASNIEIQMKEKQEVRDAFALLEESKDLHSVFQKLIKRIEVAQDGAIDIYYRFEE

SEQ ID NO: 248 - protein, 552 aa, Artificial Sequence
  Synthetic
MWASAGATTYPATVTRQRETQDGVKAGWSRTVALDHTDDADTAQALPLRAAEYVRMSTEHQQYSTENQRDRIREYAARRGLEIVRTYADEGKSGLRIDGRQALQQLIHDVESGTANFQMILVYDVSRWGRFQDADESAYYEYICKRAGIQVAYCAEQFENDGSPVSTIVKGVKRAMAGEYSRELSAKVFAGQCRLIELGFRQGGPAGYGLRRILVDQHGLMKGDLQRGEHKCLQTDRVILMPGPESETRIVNLIYDWFIDEALNEYEIAARLNGMRIRTELGREWTRATVREVLTNEKYIGNNVYNRVSFKLKKTRVVNPPEMWIRKDGAFQSIVPSETFYTAQGIMRARARRYSFEELIERLRNLYRSRGFLSGVVIDETEGMPSASVYAYRFGSLIRAYQTVGFTPGRDYRYVETNRFLRQLHPEIVAETEKKITDLGGTVSRDPATDLLTVNTEFTACIVLSRCQAHDNGRNHWKVRFDTSLLPDITVAVRLNHENAAALDYYLLPRLDFGQLRIHLADHNPIEFESYRFDTLDYLYGMAERARLRRGA

SEQ ID NO: 249 - protein, 511 aa, Artificial Sequence
  Synthetic
MLRAAIYIRVSTKLQEEKYSLRAQTTELRRYVEQQRWRLVDEFQDIESGGKLHKKGLNALLDIVEEGKIDVVVCIDQDRLSRLDTISWEYLKSTLRENKVKIAEPGTIVDLGDEDQEFVSDIKNLIAKREKKALVKRMMRGKRQRMREGKGWGQAPYEYYYDKKEEQYKLKKEWAWVIPFIDRLYLEEQLGMRSITDELNKISKTPSGIMWNEHLVHTRLTTKAYHGVQEKTFANGEVIAAENIFPKLRTKETWEKIQIERNKRGNQYKVTSRKRNDLHLLRRTYFVCGECGRKISLAAHGTKEAPRYYLKHGRKLRLADGSVCDVSINTVRVEGNIIQAIKDIVTSKELAKQYVNLENEKEEITQLEQNIKNNEQIIQKHTTKNEKLIDLYLDNHLTKEQLNKKQHEIKNITENLQTQLKRDKAKLETLKSDSWSYDFLSELFESINFFDSDFSPLERAMLMGNIFPEGIVYRDHIILKANVGGLNFDVKVLVNEDPFPWHYSKSNSKQK

SEQ ID NO: 250 - protein, 462 aa, Artificial Sequence
  Synthetic
MTVGIYIRVSTEEQAREGFSISAQREKLKAYCVSQDWTDYKFYVDEGKSAKDTNRPYLKLMLDHIQQGLIDVVLVYRLDRLTRSVKDLYKLLDLFDKNNCIFRSATEVYDTGSATGRLFITLVAAMAQWERENLGERVTMGQVEKARQGQYSAPAPFGFKKQDETLVKDKKQGYILMDMIDKVKKGWSIRQIAKYLDQSYLPIRGYKWHIATILSILHNPALYGALRWKDELNETSHEGYLTKEEFEELQNILYSRQNFRKRQIESAHIFQMKLVCPQCGNRLGCERSVYFRKKDQKNVESLHYRCQSCALNERPSISVSEKKLEKALLLFMKNVKFDLEPVVKEEKNETTEIQNAIVKIERQREKFQKAWASDLMTDEEFTARMSETRKAHENFTKRLSEIQRATPLPIDIKKAKKLVNEFKINWAYLNTEEKREFVQSFIEKIEFTKKDQNPHILNVSFY

SEQ ID NO: 251 - protein, 484 aa, Artificial Sequence
  Synthetic
MKTLKYAVYVRVSTDRDEQVSSVENQIDICRYWLEKNGYEWDPNAVYFDDGISGTAWLERHAMQLILEKARRNELDTVVFKSIHRLARDLRDALEIKEILIGHGIRLVTIEENYDSLYEGGNDIKFEMFAMFAAQLPKTLSVSISAAMQAKARRGEVIGKPGLGYDVIDKRLVINEKEAEVVREIFDLSKKGFGYKKIASILNDKGIYTKSGQLWSDTTIAKVLKNQKYKGDLVLNRYKTVKVDGRKKRIYTPKDRLTIIEDHYPAIVSKELWNEVNNNRVSQKKVKQNMRNEFRGMIFCNHCGGSITVKYSGKCSKKNKKEWVYLKCSNFLRFNQCVNFNPIYYDEIREIIIYRLKQKEKELEIHFNPKIHEKREAKSIEIKKDIKLLKAKKEKLIDLYVEGLIDKDVFSKRDLNFENEIKEQELELLKLMDQNKRVNEEQQIKKAFSMLDEEKDMHEVFKILIKKITLSKDKYVEIEYTFSL

SEQ ID NO: 252 - protein, 490 aa, Artificial Sequence
  Synthetic
MYELKYAVYVRVSTDKDEQVSSIQNQIEICRYWIEKNGFEWDENSIYKDEAVSGTAWLERHAMQLILEKVRRKELDTVVFKSIHRLGRDLRDALEIKEILLGHGVRLVTIEEGYDSYYEGKNDLKFEMYAMFASQLPKTVSVSVSAALAAKVRRGEYTGGIVPYGYKIVDQKYTINEDEAELVKKMYELYDNGLGYMKIADAINDMGVPSRTGKLWAYPSIRAIITNAAYKGDYIMQKYAEVKVDGRKKMIINPKEKWVVFENHHPAIITRDLWDKVNNPKTDKKTKRRVAINNELRGLACCAHCGTPLALQQRMYKNKEGETRYYCYLICGRYKRMGARGCVKHSGLQYSDLRLFVLQKLKEKENDLEKVFNLNDTDKHQEKQKKLRKEKKELEIKRERLLDLYLDGGPIDKETFTKRDKNFEKIIKEKELEILKLDDVKALVVEQQKVKEAFELLEESKDLYSTFKKLITRIEVNQDGVINIVYRFEE

SEQ ID NO: 253 - protein, 449 aa, Artificial Sequence
  Synthetic
MLKRAALYIRVSTDQQAKHGDSLDAQIATLKDYVSTQDNLTIIDTYIDDGISGQKLYRDEFQRLLEDIKKNRIDIILFTKLDRWFRNLRHYLNIQEILDNSGVTWLAVSQPFFNTDTAYGRSFVNQSMSFAELEAQMASERIKAVFENKIRKGEVVTGSVPFGYKICDKKLIPNENAPIAKDIFKHYSIHNSIRLTVEYLFNEYDITRSSRTIKHMLRNRKYIGEVSGNKNYCPPIVDKETFEKVQNLLDKNISSIAKRTYIFSGLVVCSCCGKKMTGRYRKRKYIKKDGTVMYYTKKVYRCNGNTYKRNKCPNKINIPEEILEEYLLYNIKADAENFEAKQKKIAVSAPEKNNNSKVLKKIERLKKAYLNEVISLDEYKKDRKELEQMIVQVKPKETIVFKSNWFKKNIESTYRDFDEEEKRFVWRSVLKNLIVDPHGKITINFLTKN

SEQ ID NO: 254 - protein, 465 aa, Artificial Sequence
  Synthetic
MKKVAIYTRVSTLEQANEGYSIEGQEQRLKAYCQVHDWDNFEFFVDAGQSASNTKRAGLQNLLNRLDEFDLVLVYKLDRLTRSVRDLMSLLDTFEEKDVKFRSATEVFDTTSAIGKLFITLVGAMAEWERSTITERTTQGRRIATEKGVYTTVPPFFYDKIEGKLYPNDKKEIVDYIVSRAKAGVSIRGITEELNNSIYNPPKGKRWDKSVISYVLTSPVSRGHTHIGDVYVENTHEPVISEEDYTIYMQSISQRTHSRGIKHTAIFRGKLTCPNCAHSLTLNTSKRTKRDGSVDYDERYICDRCRSDKSAENITIQSKEVERAFIDFIQHGEIEVNVEDTEEQEEQSVIDVDKIKRQRKKYQQAWAMDLMSDEEFQSLIKETDDLLDQHNRQQLRKKENKDNHKQIEATHDLILNLWDKMASNDKEDLINASISNIDYNFYRGHGHGKNRTPNSMSVTHIDYKV

SEQ ID NO: 255 - protein, 490 aa, Artificial Sequence
  Synthetic
MYELKYAVYVRVSTDRDEQVSSIENQIDICRYWIEKNGYEWDENSIYKDEAVSGTAWLERRAMQLILGKARKKELDTVVFKSIHRLGRDLRDALEIKEILLGHGVRLVTIEEGYDSYYEGKNDLKFEMYAMFASQLPKTLSVSISAALAAKVRRGEYTGGTVPYGYKIVDKKYVINQEEAEIVREMYELYDNGLGYLRISNALNDVGKYKRSGKLWTYSAVKLIITNPMYKGDYVMGRSTEVKVDGRKKRIQEPREKWVVFENHHPAIIERPLWDKINNPKINKKIKRRVAVTNELRGIARCIHCGSPFVLHTYKYKNKEGEELNYGYLTCGTYKLTGGRGCVKHSGLRYERLRSLVLRKLKEKERDLEKVFKLNDKDKHQEKQKKLRKEKKELEIKRERLLDLYLDGGSIDKETFTKRDANFAKNIKEKELEILKLDDVKALIVEQQKVKDAFKLLEDSENLYPVFKKLIAGIDISQNGAVDIRYRFEE

SEQ ID NO: 256 - protein, 605 aa, Artificial Sequence
  Synthetic
MKSKALVGARVSVYSDSKVSHQAQRESGHRWCQANGAEVLDEFEDLGVSAIKVSTFERPDLGAWLTPERSHEWDTIVWAKVDRAWRSMRDGLAFMHWAEDNRKRVVFADDGLELDYRNGRKKGDMQAVITDMFMLLLSMFAQIEGERFVQRSLSAHGELKTTDRWQAGTPPFGYLTVDRPSGKGKGLAKNPDQQEILHEMARLFLEGWSYNRLAIWLNDNQIKTNHNLSVTAKAQKTGKSPKKPLSDRPWQDGTVKKILTSPATQGFKVINMQPDPEKRKHGIDPDYQIASDPVTGEPIRMADPTFDPETWAKIQDKAAERTAKPRDKTKWSNPMLGVVYCNCGAAFTRISKEDRNYFYFRCGRERGQACKDRTVRGDFLESTIREFFLQGHLAHRRVTQRKFVPGNDRSEEFEQIQTSIRNMRRNYEKGYYKGEEDEYEAKMDGLVAKRDRIESEGVVIRGGYVTEDTGRTWGDLFSESEDWSVIQEAVKDAGIRLMVEGTYPLIVRVDDPNERDGIPYFSVEMKRAPDLRSNQYRIWAAIQKDPEANDTVIGSRLGVHPVTVGRWRKRMPADGIDPKPEPQYWIEPFGGTPDPGESHPGDAAA

SEQ ID NO: 257 - protein, 481 aa, Artificial Sequence
  Synthetic
MITTNKVAIYVRVSTTNQVEEGYSIDEQKDKLSSYCDIKDWNVYKVYTDGGFSGSNTDRPALESLIKDAKKRKFDTVLVYKLDRLSRSQKDTLHLIEDVFIKNGIEFLSLQENFDTSTPFGKAMIGLLSVFAQLEREQIKERMQLGKLGRAKSGKSMMWAKTSYGYDYHKETGTVTINPAQALTIKFIFESYLRGRSITKLRDDLNEKYPKHVPWSYRAVRTILDNPVYCGFNQYKGEIYPGNHEPIISKEEYDKTQSELKIRQRTAAENVNPRPFQAKYILSGIAQCGYCGAPLKIMLGVKRKDGSRLKKYECHQRHPRTLRGVTTYNDNKKCDSGFYYKDKLEASVLKEISKLQDDADYLDKIFSGDNTETIDRESYKKQIEELSKKLSRLNDLYIDDRITLEELQSKSAEFISMRGTLETELENDPALRKNKRKADMRKLLNAEKVFSMDYENQKVLVRRLINKVKVTAEDIVINWKI

SEQ ID NO: 258 - protein, 481 aa, Artificial Sequence
  Synthetic
MKITNKVAIYVRVSTTSQVEEGYSIDEQKAKLSSYCDIKDWNVYKIYTDGGFSGANTDRPALEGLIKDAKRKKFDTVLVYKLDRLSRSQKDTLYLIEDIFIKNNIAFLSLQENFDTSTPFGKAMIGLLSVFAQLEREQIKERMQLGKIGRAKAGKSMMWARTSYGYDYHRGTGTITVNPAQALAVKFIFESYLRGRSITKLRDDLNENYPKHVPWSYRAVRAILDNPVYCGFNQFKGEVYPGNHEPIITEEVYNKTKAELKIRQRTAAENVNPRPFQAKYILSGIGQCGYCGAPLKIILGVKRKDGSRFKKYECHQRHPRTLRGITTYNDNKKCDSGFYYKDDLETYVLTEISKLQDDAGYLDKIFSEDSAETIDRESYKRQIEELSKKLSRLNDLYIDDRITLEELQNKSAEFINMRATLETELENDPALRKGKRKADMRELLNAEKVFSMDYESQKVLVRGLINKVRVTAEDIVIKWKI

SEQ ID NO: 259 - protein, 461 aa, Artificial Sequence
  Synthetic
MKVAVYCRVSTLEQANGGHSIEEQERKLKSFCDINDWSIYDTYVDAGYSGAKRDRPELQRLMKDINKFDLVLVYKLDRLTRNVRDLLDLLEIFEKNDVSFRSATEVYDTTTAMGRLFVTLVGAMAEWERETIRERTQMGKLAALRKGIMLTTPPFYYDRVDNKFVPNKYKDVILWAYDEAMKGQSAKAIARKLNNSDIPPPNNTQWQGRTITHALRNPFTRGHFDWGGVHIENNHEPIITDEMYEKVKDRLNERVNTKKVKHTSIFRGKLVCPNCSARLTLNSHKKKSNSGYIFAKQYYCNNCKVTPNLKPVYIKEKEVIKVFYNYLKRFDLEKYEVTQKQNEPEITIDINKVMEQRKRYHKLYASGLMQEDELFDLIKETDQTIAEYEKQNENREVKQYDIEDIKQYKDLLLEMWDISSDEDKEDFIKMAIKNIYFEYIIGTGNTSQKNNSLKITSIEFY

SEQ ID NO: 260 - protein, 460 aa, Artificial Sequence
  Synthetic
MKVAIYTRVSTLEQREKGHSIDEQERKLRSFCDINDWTVKDVYVDAGFSGAKRDRPELTRLLDDISEFDLVLVYKLDRLTRSVRDLLDLLEVFENNNVAFRSATEVYDTTTAIGRLFVTLVGAMAEWERETIRERSLMGKRAAIKKGMILTAPPFYYDRVNNTYIPNQYKDVVLDVYNKVKKGYSIAHIARLYNNSDVKPPNDNKEWTTRMLMHALRNPVTRGHYQWGEIYIEDSHEPIITDEMYNTIIDRLDKHTNTKVVAHTSVFRGKLICPNCGYALTLNSNKRKRKNDTIVYKTYYCNNCKTTKGMKPHHITETETLRVFKDHLSKIDLKQYETQEKEKQSHVTIDLSKVMEQRKRYHKLYASGMMQENELFELIKETDEMIEEYEKQRKQVDVKEFDIGKIKEIKDVLLKSWDIFTLEDKADFIQMSIKAINIEYTKLKRGKSSNSMKIKDIEFY

SEQ ID NO: 261 - protein, 476 aa, Artificial Sequence
  Synthetic
MTVGIYIRVSTEEQAAEGYSISAQRERLKAFCVAQDYADYKFYVDEGISGRNTKRPQFKKLMGDIKAGHIKVLLVYRLDRLTRSVRDLHNILDKLEKYNCVFRSATEIYDTFTAMGRMFITIVAAIAEWESANLGERVSMGQIEKARQGEWAAQAPYGFYKDENHKLHIDDQQIKAIKIMIQKVREGLSFRQLSIYMDSTEHKPKRGYKWHIRTLMDLMQNPVLYGAMYFKGTVYENTHQGIMDKKEFDQLQKLITSRQNYKTRNVTSHFVYQMKIVCPDCGSRCTSERSVWKRKTDGSTQVRNSYRCQVCALNHRDITPFNVREFTVDEALMEFMDNFPLTPDDKPQEKTDDESLELKQELKRIENQRGKYQRAWATDLVTDEEFKIRMDESRSRMEEIQVMLKEMKCEVHEEVDIERYKEIAQNFNINFENLSPKERREFVQMFIESVEIEILERTKAKGFRNQRIRVSSVHFY

SEQ ID NO: 262 - protein, 454 aa, Artificial Sequence
  Synthetic
MSDSLIRRLRCAVYTRKSTDEGLDQEYNSIDAQRDAGHAYIASQRAEGWIPVADDYDDPAYSGGNMDRPAIKRLMADIEAGKIDIVVIYKIDRLTRSLTDFARMVDVFERHGVSFVSVTQQFNTTTSMGRLMLNILLSFAQFEREVTGERIRDKIAASKRKGMWMGGIPPIGYDVVNRRLVLNDGEAKLVRHIFRRFVEIGSSTLLVKELRLDGVTSKAWTTQDGKVRKGRPIDKALIYKLLHNRTYLGELRHRDQWYPGEHPSIIDSELWDRVHAILSTNGRARASATRAKVAKVHCLLRGMVFGSDGRALSPISTVKKDGRRYRYYVPQREKKEHAGASGLPTLPAAELEAAVLDQLRAILRSPGLIGDMLPRAIALDPSLDEAMVTVAMTRLDAIWDQLFPAEQTRIVNLLVEKVIVSPDDLEVRLRANGIERLVLELRPATDGGAEEVMA

SEQ ID NO: 263 - protein, 506 aa, Artificial Sequence
  Synthetic
MYRAAEYVRMSTEHQQYSTENQADKIREYAERRGIQIVRTYADEGKSGLSIDGRQALQRLIRDVESGDADFEMILVYDVSRWGRFQDADESAYYEYICRRAGIQVTYCAEQFENDGSPVSTIVKGVKRAMAGEYSRELSAKVFAGQCRLIELGYRQGGPAGYGLRRVLVDQTGTFKSELARGEHKSLQTDRVILMPGPEQEVATVNQIYRWFVDDGLTESEIASRLNAGCVPTDLGREWTRATVRQVLSNEKYIGNNIYNRISFKLKKHRVVNEPEMWIRKDGAFEAIVPPDIFYTAQGILRARSHRYSNEELLEKLRNLFRQRGVLSGLIIDEAEGMPSTAAYIHRFGSLLRAYEAVGFTPDRDYRFLEVNQFLRRLHPEIISQTERMILDLGGSVQRDLATDLLDVNREFTVSMVLARCLVLDNGRRRWKVRFDASLLPDITVAVRLDESNENPLDYYLLPRLDFGQPGISLADHNRIEYESYRFENLDYLYGMAERYRLRRAA

SEQ ID NO: 264 - protein, 452 aa, Artificial Sequence
  Synthetic
MKAAIYIRVSTQEQIENYSIQAQTEKLTALCRSKDWDVYDIFIDGGYSGSNMNRPALNEMLSKLHEIDAVVVYRLDRLSRSQRDTITLIEEYFLKNNVEFVSLSETLDTSSPFGRAMIGILSVFAQLERETIRDRMVMGKIKRIEAGLPLTTAKGRTFGYDVIDTKLYINEEEAKQLQMIYDIFEEEKSITTLQKRLKKLGFKVKSYSSYNNWLTNDLYCGYVSYADKVHTKGVHEPIISEEQFYRVQEIFSRMGKNPNMNRDSASLLNNLVVCGKCGLGYVHRRKDTVSRGKKYHYRYYSCKTYKHTHELEKCGNKIWRADKLEELIIDRVNNYSFASRNVDKEDELDNLNEKLKTEHTKKKRLFDLYISGSYEVSELDAMMADIDAQINYYNSQIEANEELKRDKKVQESLAELAAVDFDSLEFREKQIYLKSIINKIYIDGEQVTIEWI

SEQ ID NO: 265 - protein, 451 aa, Artificial Sequence
  Synthetic
MTKAAIYIRVSTQDQVENYSIEVQRERIRAFCKAKGWDIYDEYIDGGYSGSNLERPGIKKLITDLKNIDAVVVLKLDRLSRSQRDTLELIEEHFLKNKVDFVSITETLDTSTPFGKAMIGILSVFAQLERETIAERMRMGHIKRAENGLRGNGGDYDPAGYTRKDGHLVIKKDEAVHIKRAFDLYEQYYSITKVQEVLKEEGYPIWRFRRYRDILSNTLYIGRVTFSGKEYEGQHEPIISSEQFKRVQALLKRHKGHNAHKAKQSLLSGLITCSCCGENYVSYSTGKSKAAESKRYYYYICRAKRFPAEYEERCMNKTWSRKKLEEVIISELKNLTEEKKQTNKKEKKINYEKLIKDIDKKMERLLDLFMNTTNISKGLLEQQMEKLNLEKEKLLLKQQRSEEESISHEVTLTAIDDAFEILDFKEKQVIINNFIEQIYINQNNVKIIWRF

SEQ ID NO: 266 - protein, 515 aa, Artificial Sequence
  Synthetic
MKTAIYLRKSRADLEAEARGEGETLAKHRSTLLKIAKEMNLNVLAVREEIVSGESLVKRPEMLALLEEIEDNKYDVVLCMDMDRLGRGGMKEQGIILETFKRSNTKIMTPRKTYDLNDEWDEEYSEFEAFMARKELKIITRRMQRGRIASVEAGNYLGTHAPFGYDIHRLNKRERTLTINSEEASVVRMIFDWYANEDMGASAIRNKLNDLGYKSKLGNEWNPYSILDILKNNVYIGKVTWQKRKEVKRPDAVKRSCARQDKSDWIIADGKHEPIIPESLFEQVQEKLNSRYHIPYNTNGIKNPLAGIIKCAKCGYSMVQRYPKNRKETMDCKHRGCENKSSYTELIEKRLLEALKEWYINYKSDFEKYKQDDKLKETQVIQMNEVALRKLEKELVDVQKQKNNLHDLLERGVYTVDMFLERSNVVSDRINEITLTMEKLQKEIKTEIKKEKVKKDTIPQVEHVLDLYFKTDDPKKKNSLLKSVLEKAVYKKEKWQRLDDFELVLYPKLPQDGDI

SEQ ID NO: 267 - protein, 490 aa, Artificial Sequence
  Synthetic
MVIVAYAVYVRVSSDKDEQVSSVENQIDICRYWLENNGFEWDENAVYFDDGISGTAWLERHAIQLVLEKARKKEIDTVVFKSIHRLARDLKDALEIKEILLGHGVRLITIEEGYDSHYEGKNDMKFEMYAMFASQLPKTLSVSITAALAAKVRRGGYTGGFVPYGYEIIDGKYAINEEEAALVKEIFELYAQGFGYIKIANTINDKGARTRKGAPWTFSTLSKMIKNPAYKGTYIMQKYGTVKVNGRKKKVINPKEKWVIFEDHHPAIISHELWEKVNNKDPNKFKKKRRVSTTNELRGITVCAHCGTAMSKRNSINVSKNGTETEYSYMICNWSRITARRECVRHVPIHYKDLRALVLSKLKEKEKELDKEFGSDENQLQVKLRKLKKDINDLKFKRERLLDLYLEDERIDKDTFTIRNAKIEKEIGLKEMEIRKASNIEIQMKEKQEVRDAFALLEESKDLHSVFQKLIKRIEVAQDGAIDIYYRFEE

SEQ ID NO: 268 - protein, 518 aa, Artificial Sequence
  Synthetic
MASENDKNHKVRVAQYLRMSTDHQQYSLHNQSEYIKDYAEKNNMEIAYTYDDAGKSGVSIIGRHSLQQLLSDVEQKKIDIQAVLFYDVSRFGRFQNSDEAAYYSFLFERNGVDLIYCSEPIPTKDFPLESSVILNIKRSSAAYHSRNLSEKVFIGQVNLIKLGYHQGGMAGYGLRRLLVDENGIAKEILGFRKRKSIQTDRVILIPGPKNEIKIVNSIYDLFIDDNMPEFIIAERLNEQNIPAENGTLWTRAKIHQILTNEKYIGNNIYNKTSSKLKSRLVKNPKNEWVRCDKAYKPIISKKKYNKAQEIIQLRSVHLTNEELLEKLKQKLETNGKLSGFIIDEDDTGPSSSVYRTRFGGLLRAYTLIGYKPEHDYSYIQINEALRSFYSGIIEDFKGEIIKSNCYIDEYKYAPMLYINDEFLISVLITKCTHMKSGKLRWKVRFDNSQKADITIVIRMDSQNITPLDFYIIPKIENEYSKMCMTETNNIRLDLYRFDNLDKLLQIITRMKVRELYAA

SEQ ID NO: 269 - protein, 483 aa, Artificial Sequence
  Synthetic
MNKKVAIYVRVSTLEQAESGYSIGEQIDKLKKFADIKEWQVYDVYEDGGFSGSNTTRPALERMISDAKRKLFDTVLVYKLDRLSRSQKDTLFLIEDVFKVNNIDFVSLNENFDTSTAFGTAMIGILSVFAQLEREQIRERMKLGLVGRAKSGKAMGWHMTPFGYTYDKKSGNFIIDEVAAGVVKMIFDDYLSGISITKLRDKLNSEGHIGKDRNWSYRTLRQTLDNPTYTGVVKYDGKTFPGNHEPILTSETFQSVQYELDIRQKQAYLKNNNSRPFQSKYILSGIAKCGYCGAPLVSILGNKRKDGTRLLKYQCANRIIRKAHPVTTYNDNKQCDSGFYMMQNIEAYVINSISELQTNPQKIQEIIKLDNDQPVIDTLYLESELAKISSRLKKLSDLYMSDLMTLDDLKNRTKELKQTRKNIEAKIFSEENKHGHTKSDIFRSRIDGNNITELDYDKQSMLAKSLIRKVSVTNETIEISWDF

SEQ ID NO: 270 - protein, 477 aa, Artificial Sequence
  Synthetic
MRCAIYARVSTEEQAVEGYSISAQKKKLKAYCDAQDWDVVGYYVDEGISAKNTNRPELKRMIEHIEKGLIDCVLVHRLDRLTRSVLDLYTLLDVFEEYDCKFKSATEVYDTTTAIGRLFITIIAALAQWERENIGERVRVGQQEKVRQGKYTSPRKPYGYNADHKEGILTIIEEEAKVVRSIYNDYLKGHSATRISKRLNATKTAGRDYWNEKAVMYILENPLYIGTLRWRKETEHYFEVPNSVPAIIEEEMFNSVQILRESRQESHPRSQYGSYIFSGILKCPRCGRSLVGNYVVSKKKDGTKIKYKHYYCKGRKLNVCTMGNMSERKLEQAIIPHILSFYIDATDEDVKLENSNTENEIEQIKSELKIIEKRRKKWQYAWANDHLKDEEFTEFMQEENENEKVLTEELYKLKPAENKKLQNEELKNILKDIKLNWANLNDEEKKIFMQIILKKLVIERSDKLHAYKLEIVEMEFN

SEQ ID NO: 271 - protein, 293 aa, Artificial Sequence
  Synthetic
MRTVITYLRFSSAIQGAEGADSTRRQNDLFKQWLKKNGDAQIVASFSDEGLSGYKGKHLTGQFGDMLARIEAGEFPEGTILLVESIDRIGRLEHLETEALMNRILGNGIEIHTLQDGLIYTKDALADDLGISIIQRVKAYIAHQKSKQKSFRVSQKWGQRAKLALAGEQRLTKMVPGWIDPETFKLNEHAETVRLIFKLLLDGESLHNIARHLQSNGIKSFSRRKDANGFSVHSVRTILRSETTIGTLPASQRNDRPAIPNYYEGVVDIPTFNKAQEILDKNRKAVHLQVTTH

SEQ ID NO: 272 - protein, 474 aa, Artificial Sequence
  Synthetic
MAVGIYIRVSTQEQASEGHSIESQKKKLASYCEIQGWDDYRFYIEEGISGKNTNRPKLKLLMEHIEKGKINILLVYRLDRLTRSVIDLHKLLNFLQEHGCAFKSATETYDTTTANGRMSMGIVSLLAQWETENMSERIKLNLEHKVLVEGERVGAIPYGFDLSDDEKLVKNEKSTILLDMVERVENGWSVNRIVNYLNLTNNDRNWSPNGVLRLLRNPVLYGATRWNDKIAENTHEGIISKERFNRLQQILSDRSIHHRRDVKGTYIFQGVLRCPVCDQTLSVNRFIKKRKDGTEYYGALYRCQPCAKQNKYNFAIGEARFLKALNEYMSTVEFQTEEDEVSSEKNEREILESQLQQIARKREKYQKAWASDLMSDDEFEKLMVETRETYNECKQQLENCKDPVKIDTKYLKEIVFMFHQTFNSLESEKQKEFISKFIRTIRYTIKEQQPIRPDKSKTGKGKQKVIITEVEFYQ

SEQ ID NO: 273 - protein, 520 aa, Artificial Sequence
  Synthetic
MKKITKIDGNKGTSIIKPKLRVAAYCRVSTDNDEQLVSLQAQKSHYETYIKANPEWEYVGLYYDEGISGTKKENRSELLRMLSDCENKKIDLIITKSISRFARNTTDCLEMVRKLLDLGIYIYFEKENINTQSMESELMLSILSGLAESESISISENNKWAIQRRFQNGTFKISYPPYGYDNIDGQMVVNPEQAEIVKYIFAEVLSGKGTQKIADDLNQKGIPSKRGGRWTATTIRGILKNEKYTGDVILQKTYTDSRFNKRTNYGEKNRYLIENHHEAIISHEDFEAVDAVLNQRAKEKGIEKRNCKYLNRYAFSSKIICSECGSTFKRRIHSSGRKYIAWCCSKHISNITECSMQFIRDEDIKTAFVTMMNKLIFGQKFILRPLLNGLRSQNNAESFRRIEELETKIESNMEQSQMLTGLMAKGYLEPALFNKEKNSLETERERFLAEKYQLTRSVNGDFAKVEEVDRLLKFATKSKMLNAYEDEVFEDYVEKIIVFSREKVGFELKCGITLKERLVN

SEQ ID NO: 274 - protein, 523 aa, Artificial Sequence
  Synthetic
MAVSRNVTVIPAIKRIGNNKNSESKPKIRVAAYCRVSTDSEEQASSYEIQIEHYTNYIKRNKEWELAGIFADDGITGTNTKKRDEFNRMIEECMAGNIDMIITKSISRFARNTLDCLKYIRQLKDKNIAVFFEKENINTMDSKGEVLLTIMASLAQQESQSLSQNVRLGIQYRYQQGEVQVNHKRFLGYTKDENKQLVIDPEGAEVVKRIFREYLEGSSLLQIARGLEADGILTAAGKSKWRPETLKKILQNEKYIGDALLQKTYTIDFLSKKRVKNNGIVPQYYVENSHEPIIPRELFMQVQEEMVRRVNLRGGKGGKKRVYSSKYALSSIVYCGQCGDIYRRVHWNNRGYKSIVWRCVSRLEEKGSECTAPTINEETLQAAVVKAINELLTKKEPFLSTLQKNIATVLNEENDNTTDDIDRKLEELQQQLLIQAKSKNDYEDVADEIYRLRELKQNALVENAEREGKRQRIAEMTDFLNEQSCELEEYDEQLVRRLIEKVAVLEDKLVIEFKSGIEIEEEM

SEQ ID NO: 275 - protein, 506 aa, Artificial Sequence
  Synthetic
MKPRQWAAENTEEKPKLKVAAYCRVSTEMEEQASSYEAQVQHYTDYIQRNPDWELAGIFADEGISGTGTKKRDGFNRMIEECKKGDVEYIITKSISRFARNTVDCLQYIRQLKDLHIAVFFEKENINTMDAKGEVLLTIMASLAQQESQSLSQNTKMGVQYRFQQGQLRINHNHFLGYTKDEDGNLVIEPKEAEVIKRIFREYLEGSSLQEIANGLMSDGILTGGKRKLWRGEGVRLILRNEKYMGDALLQKTYTTDFLTKKRVKNDGSYAQQYYVENSHPAIIPRDIFMQVQQELDRRKSMKNKHSQCFSGKYALSGITVCGDCGNAYRRVHWKNRGTVWRCKSRVDKREHNCSGRTIYEKDLHEAIIKAINETLVDREDFLQQLSENINSVLTDGLTGRLEELDSKLKELESEIISMAFGGQGYDELATKILALRNERDMVGREIAADANMQQRIDEMGDFVKNHDTISEYSEVLVRRLIEKVTIFEKDIVVDFKSGVNIAIEI

SEQ ID NO: 276 - protein, 452 aa, Artificial Sequence
  Synthetic
MKAAIYIRVSTQEQIENYSIQAQTEKLTALCRSKDWDVYDIFIDGGYSGSNMNRPALNEMLSKLHEIDAVVVYRLDRLSRSQRDTITLIEEYFLKNNVEFVSLSETLDTSSPFGRAMIGILSVFAQLERETIRDRMVMGKIKRIEAGLPLTTAKGRTFGYDVIDTKLYINEEEAKQLRLIYDIFEEEQSITFLQKRLKKLGFKVRTYNRYNNWLTNDLYCGYVSYKDKVHVKGIHEPIISEEQFYRVQEIFARMGKNPNMNRDSASLLNNLVVCGKCGLGFVHRRKDTVSRGKKYHYRYYSCKTYKHTHELEKCGNKIWRADKLEELIIDRVNNYSFASRNVDKEDELDYLNEKLKIEHAKKKRLFDLYINGSYEVSELDSMMNDIDAQINYYESQIEANEELKKNKKIQENLADLATVDFDSLEFREKQLYLKSLINKIYIDDEQVTIEWL

SEQ ID NO: 277 - protein, 452 aa, Artificial Sequence
  Synthetic
MKAAIYIRVSTQEQVENYSIQAQTEKLTALCRSKDWDVYDTFIDGGYSGSNMNRPALNEMLSKLHEIDAVVVYRLDRLSRSQRDTITLIEEYFLKNNVEFVSLSETLDTSSPFGRAMIGILSVFAQLERETIRDRMVMGKIKRIEAGLPLTTAKGRTFGYDVIDTKLYINEEEAKQLQMIYDIFEEEKSITTLQKRLKKIGFKVKSYSSYNNWLTNDLYCGYVSYADKVHTKGVHEPIISEEQFYRVQEIFSRMGKNPNMNRDSASLLNNLVVCGKCGLGFVHRRKDTVSRGKKYHYRYYSCKTYKHTHELEKCGNKIWRADKLEELIIDRVNNYSFASRNVDKEDELDSLNEKLKIEHTKKKRLFDLYISGSYEVSELDAMMSDIDAQINYYEAQIEANEELKKNKKIQENLADLATVDFNSLEFREKQLYLKSLINKIYIDDEQVTIEWL

SEQ ID NO: 278 - protein, 521 aa, Artificial Sequence
  Synthetic
MKVPVWCYARISTLKQIDGFGIQRQINTINQFLQCVELDHRLPFTLDVDNVTQMVAEGKSAFREKNWNEKTKLGQYRKLVMDGVVKESVLITESIDRLTRLDPYKAVEILSGLINRGTTILEVDTGMTYSRYIPESLSVLTMQINRANGESKRKSIMMQKSHANRYGKVSKVRPRWFDVVEIDDIKQYRPNETAKAIQRMYNDYINGIGAAHIVRTYGNTDNGKAWTLVTVLRALSDKRVADDARYPPIIDKDLYDSVQALKAATNKKGNTHQKNMLNIFSGMSRCPVCNQSIIVKRNSHGNLFTVCLGKRTNKTCSARSISYFALERPLLTAIRGLDFSEVYKHEDKNVLTLRDQWIQNERDIAAFRERLNKASRHEKFAILDELEIMNREQEELTIRLKSVDVPKDIQLTFDDDKLDLDTNYRIELNNRIKKLIQHINIVREDVSKSSYTIYCTIKYWTDVISHLVIIDVNIKRTGTGGTNTLTTTLRSVSSLNMDGTVSGNPDSDAWEYWKSFLDNLK

SEQ ID NO: 279 - protein, 506 aa, Artificial Sequence
  Synthetic
MKPRQWAAENTEEKPKLKVAAYCRVSTEMEEQASSYEAQVQHYTDYIQRNPDWELAGIFADEGISGTGTKKRDGFNRMIEACQKGDVEYIITKSISRFARNTVDCLQYIRQLKDLHIAVFFEKENINTMDAKGEVLLTIMASLAQQESQSLSQNTKMGVQYRFQQGQLRINHNHFLGYTKDEDGNLVIEPKEAEVIKRIFREYLEGSSLQEIANGLMSDGILTGGKRKLWRGEGVRLILRNEKYMGDALLQKTYTTDFLTKKRVKNDGSYAQQYYVENSHPAIIPRDIFMQVQQELDRRKSMKNKHSQCFSGKYALSGITVCGDCGNAYRRVHWKNRGTVWRCKSRVDKREHNCSGRTIYEKDLHEAIIKAINETVVDREDFLQQLSENINSVLTDGLTGRLEELDSKLKELESEIISMAIGGQGYDELVSQIFSLRDERDAVAKQIAANTNLQQRVDEMVVFVKEHDVINEYSEVLVRRLIEKVTIFEKNIVVDFKSGVRVTVEI

SEQ ID NO: 280 - protein, 452 aa, Artificial Sequence
  Synthetic
MKAAIYIRVSTQEQIENYSIQAQTEKLTALCRSKDWDVYDIFIDGGYSGSNMNRPALNEMLSKLHEIDAVVVYRLDRLSRSQRDTITLIEEYFLKNNVEFVSLSETLDTSSPFGRAMIGILSVFAQLERETIRDRMVMGKIKRIEAGLPLTTAKGRTFGYDVIDTKLYINEEEAKQLRLIYDIFEEEQSITFLQKRLKKLGFKVRTYNRYNNWLTNDLYCGYVSYKDKVHVKGIHEPIISEEQFYRVQEIFARMGKNPNMNRDSASLLNNLVVCGKCGLGFVHRRKDTISRGKKYHYRYYSCKTYKHTHELEKCGNKIWRADKLEELIIDRVNNYSFASRNVDKEDELDYLNEKLKIEHAKKKRLFDLYINGSYEVSELDSMMNDIDAQINYYESQIEANEELKKNKKIQENLADLATVDFDSLEFREKQLYLKSLINKIYIDDEQVTIEWL

SEQ ID NO: 281 - protein, 452 aa, Artificial Sequence
  Synthetic
MKAAIYIRVSTQEQIENYSIQAQTEKLTALCRSKDWDVYDIFIDGGYSGSNMNRPALNEMLSKLHEIDAVVVYRLDRLSRSQRDTITLIEEYFLKNNVEFVSLSETLDTSSPFGRAMIGILSVFAQLERETIRDRMVMGKIKRIEAGLPLTTAKGRTFGYDVIDTKLYINEEEAKQLRLIYDIFEEEQSITFLQKRLKKLGFKVRTYNRYNNWLTNDLYCGYVSYKDKVHVKGIHEPIISEEQFYRVQEIFSHMGKNPNMNKESASLLNNLVVCSKCGLGFVHRRKDTVSRGKKYHYRYYSCKTYKHTHELEKCGNKIWRADKLEELIIDRVNNYSFASRNIDKEDELDSLNEKLKIEHTKKKRLFDLYISGSYEVSELDAMMNDIDAQINYYEAQIEANEELKKNKKIQENLADLATVDFNSLEFREKQLYLKSLINKIYIDDEQVTIEWL

SEQ ID NO: 282 - protein, 452 aa, Artificial Sequence
  Synthetic
MKAAIYIRVSTQEQVENYSIQAQTEKLTALCRSKDWDVYDTFIDGGYSGSNMNRPALNEMLSKLHEIDAVVVYRLDRLSRSQKDTITLIEEYFLKNNVEFVSLSETLDTSSPFGRAMIGILSVFAQLERETIRDRMVMGKIKRIEAGLPLTTAKGRTFGYDVIDTKLYINEEEAKQLRLIYDIFEEEQSITFLQKRLKKLGFKVRTYNRYNNWLTNDLYCGYVSYKDKVHVKGIHEPIISEEQFYRVQEIFSRMGKNPNMNKESASLLNNLVVCSKCGLGFVHRRKDTVSRGKKYHYRYYSCKTYKHTHELEKCGNKIWRADKLEELIIDRVNNYSFASRNIDKEDELDSLNEKLKIEHAKKKRLFDLYINGSYEVSELDYMMNDIDAQINYYEAQIEANEELKKNKKIQENLADLATVDFNSLEFREKQLYLKSLINKIYIDGEQVTIEWL

SEQ ID NO: 283 - protein, 457 aa, Artificial Sequence
  Synthetic
MRCAIYRRVSTDEQAEKGFSLENQKLRLESFATSQGWEVVEDYVDDGFSGKDTNRPALQRMFSNVDKFDVILVYKLDRFTRSVKDLNEMLETIKENEIAFKSATESIDTTTATGRMILNMMGTTAQWERETISERIKDVFGKLRENGIFSTGHPPYGYRCSGNKSIEIVEEQAEIVRYIYELSKTMGLFKISVELNRKGIKTRRNNKFGQSAVKRILHNPFYCGYMEVNNKWVPIKNEGYIPIISEEEFKTTQKILTKRNKAQTRSRSVSYYPFSGIVLCPECQRAMRGDRAKYGDYYYRYYRCVYGRENINCTNRKRIRAEQVDKAFAEYISGSFENTTIKLDSKDIKSDIEYELKHLDSKIERLSDIYIEGDITKSKYNEKMNSLLNEKEKLKKDLTSCKENVDAEFVRDQINKLESIWHLIDDKTKSESIRSIFDTIKIKQDKNKVTIMDHTLL

SEQ ID NO: 284 - protein, 487 aa, Artificial Sequence
  Synthetic
MKYAVYVRVSTDKDEQVSSIQNQIEICRYWIEKNGFEWDENSIYKDEAVSGTAWLERRAMQLILGKARKKELDTVVFKSIHRLGRDLRDALEIKEILLGHGVRLVTIEEGYDSYYEGKNDLKFEMYAMFASQLPKTLSVSISAALAAKVRRGEYTGGTVPYGYKIVDKKYVINQEEAEIVREMYELYDNGLGYLRISNALNDVGKYKRSGKLWTYSAVKLIITNPMYKGDYVMGRSTEVKVDGRKKRIQEPREKWVVFENHHPAIIERPLWDKINNPKINKKIKRRVAVTNELRGIARCIHCGSPFVLHTYKYKNKEGEELNYGYLTCGTYKLTGGRGCVKHSGLRYERLRSLVLRKLKEKERDLEKVFKLNDKDKHQEKQKKLRKEKKELEIKRERLLDLYLDGGSIDKETFTKRDANFAKNIKEKELEILKLDDVKALIVEQQKVKDAFKLLEDSENLYPVFKKLIARIDISQNGAVDIRYRFEE

SEQ ID NO: 285 - protein, 515 aa, Artificial Sequence
  Synthetic
MKTAIYLRKSRADLEAEARGEGETLAKHRTTLLKIAKEKNLNVLAVREEIVSGESLVKRPEMLALLEEIEDNKYDVVLCMDMDRLGRGGMKEQGIILETFKRSNTKIMTPRKTYDLNDEWDEEYSEFEAFMARKELKIITRRMQRGRIASVEAGNYIGTHAPYGYDILRLNKRERTLTINLEEASVVRMIFEWYANEDMGASVITNKLNQLGYKSKLGNDWNPYSVLDMLKNNIYIGKVTWQKRKEVKRPDATKRSCTRQDKSEWIIADGKHDPIISESLFEKAQEKLNTRYHVPYNTNGLKNPLAGVIRCGKCGYSMVQRYPKNRKKTMDCKHRGCENKSSYTELIEKRLLEALKEWYINYKADFNKNNQENLSKEKQTIKINQAALRKLEKELLDVQKQKNNLHDLLERGVYTVDMFLERSNVVSDRINEITETMENLRKEIKTEITKEKVKKDTIPQVEHVLDLYFKTDDPQKKNSLLKSVLEKAVYTKEKWQRLDDFKLVLYPKLPQDGDK

SEQ ID NO: 286 - protein, 478 aa, Artificial Sequence
  Synthetic
MKVALYVRVSTLEQAEEGYSINEQKDKLKKYCEIKDWTIVKEYIDPGRSGSNINRPSMQQLIKDADTGLYDAVLVYKLDRLSRSQKDTLYLIEDVFQKNNIHFISLSENFDTSTAFGKAMIGILSVFAQLEREQIKERMSMGRVGRAKSGKIMEFNNPAFGYEIDGDNYKVDPLRAEIVKRIYKMYLSGTSINKIKETLNSEGHIGNKKNWSDTRIRYILSNPTYLGKIRYDGKTYDGKFSPIIDEETFNKTQNELKERQTATYKRFNMKLRPFQSKYMLSGLLRCGYCGATLFVNSYVYNGKRKLRYNCPSTYKSKQKTRTYKIMDPNCPFKLVYAKDLEPAVINEIKNLALNPQSIQKPIKKKPDIDVETIQKELAKIRKQQQRLIDLYVISDDVNIDNISKKSADLKLQEETLKKQLAPLEEPDNDDKIVAFNEILAQIKDIDSLDYDKQKFIVKKLIKKIDVWNDNKIKIHWNI

SEQ ID NO: 287 - protein, 458 aa, Artificial Sequence
  Synthetic
MREQKDKLKKYCEIKDWTIVKEYIDPGRSGSNINRPSMQQLIKDADTGLYDAVLVYKLDRLSRSQKDTLYLIEDVFQKNNIHFISLSENFDTSTAFGKAMIGILSVFAQLEREQIKERMSMGRVGRAKSGKIMEFNNPAFGYEVDGDNYKVDPLRAEIVKRIYKMYLSGTSINKIKETLNSEGHIGNKKNWSDTRIRYILSNPTYLGKIRYDGKTYDGKFSPIIDEETFNKTQNELKERQTATYKRFNMKLRPFQSKYMLSGLLRCGYCGATLFVNSYVYNGKRKLRYNCPSTYKSKQKTRTYKIMDPNCPFKLVYAKDLEPAVINEIKNLALNPQSIQKPVKKTPDIDVEAIQKELAKVRKQQQRLIDLYVISDDVNIDNISKKSADLKLQEETLKKQLAPLEEPDNDDKIVAFNEILDQIKDIDSLDYDKQKFIVKKLIKKIDVWNDNKIKIHWNI

SEQ ID NO: 288 - protein, 515 aa, Artificial Sequence
  Synthetic
MKTAIYLRKSRADLEAEARGEGETLAKHRSTLLKIAKEMNLNVLAVREEIVSGESLVKRPEMLALLEEIEDNKYDVVLCMDMDRLGRGGMKEQGIILETFKRSNTKIMTPRKTYDLNDEWDEEYSEFEAFMARKELKIITRRMQRGRIASVEAGNYLGTHAPFGYDIHRLNKRERTLTINSEEASVVRMIFDWYANEDMGASAIRSKLNDLGYKSKLGNEWNPYSILDILKNNVYIGKVTWQKRKEVKRPDAVKRSCARQDKSDWIIADGKHEPIIPESLFEQVQEKLNSRYHIPYNTNGIKNPLAGIIKCSKCGYSMVQRYPKNRKETMDCKHRGCENKSSYTELIEKRLLEALKEWYINYKADFEKHKQDDKLKETQVIQMNEAALRKLEKELVDVQKQKNNLHDLLERGVYTVDMFLERSNVVSDRITEITSTMENLKKEIKTEIKKEKVKKDTIPQVEHVLDLYFKTDDPKKKNNLLKSVLEKAVYKKEKWQRLDDFELVLYPKLPQDGDI

SEQ ID NO: 289 - protein, 515 aa, Artificial Sequence
  Synthetic
MKTAIYLRKSRADLEAEARGEGETLAKHRTTLLKIAKEKNLNVLAVREEIVSGESLVKRPEMLALLEEIEDNKYDIVLCMDMDRLGRGGMKEQGIILETFKRSNTKIMTPRKTYDLNDEWDEEYSEFEAFMARKELKIITRRMQRGRIASVEAGNYLGTHAPYGYDIHRLNKRERTLTINSEEASVVRMIFEWYANEDMGANAIMRKLNELGYKSKLGNDWSPYSILDILKNNVYIGKVTWQKRKEVKRPDSVKRSCARQDKSEWIIADGKHEPILSESLFEKVQEKLNSRYHVPYNTNGLKNPLAGIIKCGKCGYSMVQRYPKNRKQTMDCKHRGCENKSSYTELIEKRLLEALKEWYINYKADFEKNKQDESTKETQIIQMNEATLRKLEKELVDVQKQKNNLHDLLERGVYTVDMFLERSNVVSNRINEITETMENLRKEIKTEITKEKVKKDTIPQVEHVLDLYFKTDDPQKKNSLLKSVLEKAVYTKEKWQRLDDFKLLLYPKLPQDGDK

SEQ ID NO: 290 - protein, 515 aa, Artificial Sequence
  Synthetic
MKTAIYLRKSRADLEAEARGEGETLAKHRSTLLKIAKEKNLNVLTVREEIVSGESLVKRPEMLALLEEIEDNKYDVVLCMDMDRLGRGGMKEQGIILETFKRSNTKIMTPRKTYDLNDEWDEEYSEFEAFMARKELKIITRRMQRGRIASVEAGNYLGTHAPYGYDIHRLNKRERTLTINLEEASVVRMIFEWYAHEDMGANAIMRKLNELGYKSKLGNDWNPYSILDMLKNNVYIGKVTWQKRKEVKRPDATKRSCTRQDKSEWIIADGKHDPIIPESLFEKAQEKLNTRYHVPYNTNGLKNPLAGIVRCGKCGYSMVQRYPKNRKHTMDCKHRGCENKSSYTELIEKRLLEALKEWYINYKADFEKNKQDESTKETQIIQMNEAALRKLEKELVDVQKQKNNLHDLLERGVYTVDMFLERSNVVSNRINEITETMENLRKEIKTEITKEKVKKDTIPQVEHVLDLYFKTDDPKKKNSLLKSVLEKAVYTKEKWQRLDDFKLVLYPKLPQDDDK

SEQ ID NO: 291 - protein, 457 aa, Artificial Sequence
  Synthetic
MRCAIYRRVSTDEQAEKGFSLENQKLRLESFATSQGWEVVEDYVDDGFSGKDTNRPALQRMFSNVDKFDVILVYKLDRFTRSVKDLNEMLETIKKNEIAFKSATESIDTTTATGRMILNMMGTTAQWERETISERIKDVFGKLRENGIFSTGHPPYGYRCSGNKSIEIVEEQAEMVRYIYELSKTMGLFKISVELNGKGIKTRRNNKFGQSAVKRILHNPFYCGYMEVDNKWVPIKNEGYTPIISEEEFKTTQKILTKRTKAQTRSRSVSYYPFSGIVLCPECQRAMRGDRAKYGDYYYRYYRCVYGRENINCTNRKRIRAEQVDKAFAEYISRSFENTTIKLDSRDIKSDIEYELKHLDSKIERLSDIYIEGDITKSKYNEKMNSLLNEKEKLKKDLTSCKEHVDAEFVRNQINKLESIWNLIDDKTKSESIRSIFDTIKIKQDKNTVTIMDHTLL

SEQ ID NO: 292 - protein, 470 aa, Artificial Sequence
  Synthetic
MKCVIYRRVSTDEQAEKGFSLENQKLRLESFATSQGWEVVGDYVDDGYSGKNMERPALKRMFNDVDKFDVILVYKLDRFTRSVRDLNDMMETIKEHDIAFKSATEFIDTTTATGRMILNMMGSTAQWERETISERVTDTMYKRAESGLWNGGRIPFGYKQVGRNLIINEEESTIVKEMFDLSLSYGFLGVSLKLNERGYKTKTGCKWNRTGVRHILMNPIYCGYVRYGNQNNDTKDVVMAKIKQDGFKEIVSKERFDECQRIFESRKKNAPKPRHGEFNYFSGIFVCPNCGRKLYGVTYQQKDNIYKYYKCSKQSQKFCEGFHISLEVLDAAFLKELNLILDDVKISPLKKIDPVSIKKEIDEISKKKERIKNLYIDEIISRDEMKEKIEELNIKEKDLYNTLSEEEQQISESIIRETFENLSQNWKQIPDEIKMYMIRSVFESIEFKVIKKARGRWHKAVIEITDYKMR

SEQ ID NO: 293 - protein, 515 aa, Artificial Sequence
  Synthetic
MKTAIYLRKSRADLEAEARGEGETLAKHRSTLLKIAKEMNLNVLAVREEIVSGESLVKRPEMLALLEEIEDNKYDVVLCMDMDRLGRGGMKEQGIILETFKRSNTKIMTPRKTYDLNDEWDEEYSEFEAFMARKELKIITRRMQRGRVASVEAGNYLGTHAPYGYDIHRLNKRERTLTINSEEASVVRMIFDWYANEDMGASAIRNKLNDLGYKSKLGNDWNPYSILDILKNNVYIGKVTWQKRKEVKRPDAVKRSCARQDKSDWIIADGKHEPIIPESLFEQVQEKLNSRYHVPYNTNGIKNPLAGIIKCSKCGYSMVQRYPKNRKETMDCKHRGCENKSSYTELIEKRLLEALKEWYINYKADFEKHKQDDKLKETQVIQMNEAALRKLEKELVDVQKQKNNLHDLLERGVYTVDMFLERSNVVSDRITEITSTMGNLKKEIKTEIKKEKVKKDTIPQVEHVLDLYFKTDDPKKKNSLLKSVLEKAVYKKEKWQRLDDFELVLYPKLPQDGDI

SEQ ID NO: 294 - protein, 461 aa, Artificial Sequence
  Synthetic
MRCAIYRRVSTDEQVEKGYSLENQKIRLESFATSQGWEVVGDYVDDGYSGKDTNRPAFKKMFKDVEKFDVILVYKLDRFTRSVKDLNEMLETIREHDIAFKSATESIDTTTATGRMILNMMGSTAQWERETISERIKDVIDKQREQGIWNGGITPYGYRKTDGILSVQEDEAETVRFIFKNVIAYGYIKISKLLNEKGIPTAKGKGLWIAQSVRNIVKNHYYYGKMNYCNNGREEFAEIKIEGYKPIISKDEFNLAQKATKKRASTPTRSRSDEIYPFSGIAVCPQCGAKLGGTIVKVRGSKYKYYRCSKRNQNRCNSPAFRDTSLDEAFLKYLKMPYPDLKVKRVDNLNSSDVIKKEIKKLNSKKDKVKELYIEEFLTKKEFKDKIFTIDNKILELESELENNNQAISDDLYRETLLFMEQTWNGLDDETKAFSLRGLFDSLVFKKTGRSKVEFIDHTLL

SEQ ID NO: 295 - protein, 487 aa, Artificial Sequence
  Synthetic
MKYAVYVRVSTDKDEQVSSIQNQIEICRYWIEKNGFEWDENSIYKDEAVSGTAWLERRAMQLILGKARKKELDTVVFKSIHRLGRDLRDALEIKEILLGHGVRLVTIEEGYDSYYEGKNDLKFEMYAMFASQLPKTLSVSISAALAAKVRRGEYTGGTVPYGYKIVDKKYVINQEEAEIVREMYELYDNGLGYLRISNALNDVGKYKRSGKLWTYSAVKLIITNPMYKGDYVMGRSTEVKVDGRKKRIQEPREKWVVFENHHPAIIERPLWDKINNPKINKKIKRRVAVTNELRGIARCIHCGSPFVLHTYKYKNKEGEELNYGYLTCGTYKLTGGRGCVKHSGLRYERLRSLVLRKLKEKERDLEKVFKLNDKDKHQEKQKKLRKEKKELEIKRERLLDLYLDGGSIDKETFTKRDGNFVKNIQEKELEILKLDDVKALIVEQQKVKDAFKLLEDAENLYPVFKKLIARIDISQNGAVDIRYRFEE

SEQ ID NO: 296 - protein, 475 aa, Artificial Sequence
  Synthetic
MSVAIYVRVSTLEQAESGYSIGEQTEKLKSYCKIKDWDIAKIYTDPGYSGSSLDRPAIQALISDCKAGFFDAVLVYKLDRLSRSQKDTLYLIEDVFNANNIHFMSLSENFDTSTPFGKAMIGLLSVFAQLEREQIKERMQMGKLGRAKAGKISAWANVPFGYVKNKDTYDIDPLRSEIVKRIYKDYLSGKSITRIMQDLNQEGHIGKDTLWSYRTVRQVLDNETYTGRTKYRGQVFNGLHKSIITKDDWDEVQRLLKIRQLDQAKKSNNPRPFQARYMLSGLLKCVYCGSTLAIAKSHTKDGPLWRYVCPSHNVRKYRNGGSAAHYRIAPINCKFKFKYMSELESAVIHEVKKIALDPSAVISSQDDQPEIDKAAIKAQLKKIKRQQDKLVDLYLLGDDLDVDQLHKRADQLKEQAAALRAQLKPSDKNIESFKKTVKDAKEIEKLDYEHQKSIVRMLIDHVNVGNDGINIFWKM

SEQ ID NO: 297 - protein, 449 aa, Artificial Sequence
  Synthetic
MLKRAALYIRVSTDQQAKHGDSLDAQIATLKDYVSTQDNLTIIDTYIDDGISGQKLYRDEFQRLLEDIKKNRIDIILFTKLDRWFRNLRHYLNIQEILDNSGVTWLAVSQPFFNTDTAYGRSFVNQSMSFAELEAQMASERIKAVFENKIRKGEVVTGSVPFGYKICDKKLIPNENAPIAKDIFKHYSIHNSIRLTVEYLFNEYDITRSSRTIKHMLRNRKYIGEVSGNKNYCPPIVDKETFEKVQNLLDKNISSIAKRTYIFSGLVVCSCCGKKMTGRYRKRKYIKKDGTVMYYTKKVYRCNGNTYKRNKCPNKINIPEEILEEYLLNNIKADAENFEAKQKKIAVSAPEKNNNSKILKKIERLKKAYLNEVISLDEYKKDRKELEQMIVQVKPKETIVFKSNWFNKNIESTYRDFDEEEKRFVWRSVLKNLLVDPHGKITINFLTKN

SEQ ID NO: 298 - protein, 452 aa, Artificial Sequence
  Synthetic
MKAAIYIRVSTQEQIENYSIQAQTEKLTALCRSKDWDVYDIFIDGGYSGSNMNRPALNEMLSKLHEIDAVVVYRLDRLSRSQRDTITLIEEYFLKNNVEFVSLSETLDTSSPFGRAMIGILSVFAQLERETIRDRMVMGKIKRIEAGLPLTTAKGRTFGYDVIDTKLYINEEEAKQLQMIYDIFEEEKSITTLQKRLKKLGFKVKSYSSYNNWLTNDLYCGYVSYADKVHTKGVHEPIISEEQFYRVQEIFSRMGKNPNMNRDSASLLNNLVVCGKCGLGYVHRRKDTVSRGKKYHYRYYSCKTYKHTHELEKCGNKIWRADKLEELIIDRVNNYSFASRNVDKEDELDSLNEKLKTEHTKKKRLFDLYISGSYEVSELDAMMSDIDAQINYYEAQIEANEELKKNKQIQENLADLATVDFDSLEFREKQLYLKSLINKIYIDGEQVTIEWL

SEQ ID NO: 299 - protein, 470 aa, Artificial Sequence
  Synthetic
MKGESKLDKKAAIYIRVSTQEQATEGYSIQAQTDRLTKYVEAKDFILYKKYIDAGYSASKLERPAMQELIQDVQSKKVDIVIVYKLDRLSRSQKDTMYLIEDIFRPNDVELISMQESFDTSTAFGSATVGMLSVFAQLERKSISERMITGRVERAKKGFYHTGGQDRPPAGYQFNSDNQLIINEYEAAAIKDLFRLYNDGLGKSSISEYLKKNYPGKNKWLPSSIDRMLKNSLYIGKVKFSGAEYDGIHEPIIDEVTFYKTQKEIARRKQTNTKRYNYVALLGGLCECGICGAKMANRRAVGRKGKVYRYYRCYSKKGSPKHMMKTDGCSSKAQQQFIIDEAVINNLKNIDVEAELKRRSAPQTNTSLISSQIESIDKQINKLIDLFQVDSMPLDVISEKIDKLNKEKQSMEKLLERKNKLDKTELQHRFDILKSFDWDNSSIESKRVVIEMLVQKVIIHDNSIEIILVE

SEQ ID NO: 300 - protein, 452 aa, Artificial Sequence
  Synthetic
MKAAIYIRVSTQEQIENYSIQAQTEKLTALCRSKDWDVYDIFIDGGYSGSNMNRPALNEMLSKLHEIDAVVVYRLDRLSRSQRDTITLIEEYFLKNNVEFVSLSETLDTSSPFGRAMIGILSVFAQLERETIRDRMVMGKIKRIEAGLPLTTAKGRTFGYDVIDTKLYINEEEAKQLRLIYDIFEEEQSITFLQKRLKKLGFKVRTYNRYNNWLTNDLYCGYVSYKDKVHVKGIHEPIISEEQFYRVQEIFSRMGKNPNMNRDSASLLNNLVVCGKCGLGFVHRRKDTVSRGKKYHYRYYSCKTYKHTHELEKCGNKIWRADKLEELIIDRVNNYSFASRNIDKEDELDSLNEKLKIEHTKKKRLFDLYISGSYEVSELDAMMSDIDAQINYYEAQIEANEELKKNKKIQENLADLATVDFNSLEFREKQLYLKSLINKIYIDDEQVTIEWL

SEQ ID NO: 301 - protein, 581 aa, Artificial Sequence
  Synthetic
MTALLQVVEPELWVGYIRVSTWNEEKISPEIQEDALRAWAIRTGRRLADPLVVDLDATGRNFNRKIQGAIERVERREAKGIAVWRFSRFGRNRVGNNVNLARLESVGGQLESATEPVDARTALGELQREMIFAFGNYESNRAGEQWRETHEVRLKNQLPATGRARFGYVWHPRRVPDPTAPTGWRLQDERYTLHQEYASVAEEMFERKLAKPVPQGFNTIGHWLNEELRVTTLRGGLWHTSTISRYMDSGFAAGYLLSHDRECTCGYGKDPKQSKCANGRMLYLPGAQPKIIEDDVWEEYKAHRKLTKNKPPRTRKATYTLTGLLRHGYCRHHISHASATQKGVQVPGHWLVCSRNKNVSKIACPQGINASRKEVEDQVFDWLGRVAPKVDALPVIPGQTTAPKEDPRVATKRERAWINTELKKVEAALDRLVEDNAMDPDKYPADAFDRVRNKFVAKKGALTKQLAALGEAEATPQREDFQPLIDSLLAEWESFTNIERNAMLETAIRRVVVHDIRSEDSRFIKIRTEVHPVWEPDPWEPKKICRGPFGTRAGWLSAALFERPAEFDIEHQAQSEAAPAA

SEQ ID NO: 302 - protein, 482 aa, Artificial Sequence
  Synthetic
MVDAGQRVLGRIRLSRLTDESTSKERQQEVIEQWSQMNGHTIVGWAEDMDVSRSVDPFDTPALGEWLTKPEKVEQWDIVATWKLDRLATGSIYLNKMMHWCFKHGKVIVSVTENFDLSTWVGRMIANVIAGVAEGELEAIKERTKASRKKLVESGRWPGGKAPYGYRPVKLDDGGWALEINPEQEAVILRAAAEIIDGAAFESVAKRLREEGVPTPRGGTWAPSVLKKMLMNKSLLGHSTYRGETVRDAHGNPVLISDPIFQLDEWNRLQAAAEARTVAPRRTRQTSPLLGIVKCWECEENLAYKYYKTRHCYYHCRHSGEHTQMMRSEDVEKWLEEEFLLKVGDELAQERVYVPAENHRQALDEATKAVDELTALLATVSSDTMRTRLLGQLGSLDAKISELEKMPSREAGWELREMDYTYRDAWERADTEGKRQLLLRSEITAQIKLTDRSANGAGGAGMFHTKLNIPEDILERLAASRD

SEQ ID NO: 303 - protein, 476 aa, Artificial Sequence
  Synthetic
MEVAAYLRVSTDEQAESGHSLLEQQERLKAYAKVMGWDKPTFYIDDGYSAGSLKRPQLQKLIRDIENRKVSILMTTKLDRLSRNLLDLLQIIKFMETHDCNYVSATESFDTSTAAGRMVLHLLGVFAEFERGRTSERVKDNMTSLARNTNIALSGPCFGFDIIDKQYVLNKKEAKYGLKMVEMTEAGHGTRSIAQWLNSMNVKTKRGKQWDSTTVRRLLRTETICGTRVINKRKKVNGKTVMRPKEEWIIKENNHEGFISPERFKNLQNILDSRKINKQHENETYLLTGILKCGYCGGTMKGSSARVSRGDKKYEYYRYICSSYVKGSGCKHHAAHREDIENAVIIQIESITNSSNKELQLKVVTSNEDEDVFELKRALESLNKQMMRQIEAYGKGLIEEEDLERSNKHVKEQRQLLRNQLDSLEQFNTPKALKEKAKILLPDIKSLDRKKAKTTIAQLIDSLVLTDGELDIVWRI

SEQ ID NO: 304 - protein, 506 aa, Artificial Sequence
  Synthetic
MKPRQWAAENTEEKPKLKVAAYCRVSTEMEEQASSYEAQVQHYTDYIQRNPDWELAGIFADEGISGTGTKKRDGFNRMIEECKKGDVEYIITKSISRFARNTVDCLQYIRQLKDLHIAVFFEKENINTMDAKGEVLLTIMASLAQQESQSLSQNTKMGVQYRFQQGQLRINHNHFLGYTKDEDGNLVIEPKEAEVIKRIFREYLEGSSLQEIANGLMSDGILTGGKRKLWRGEGVRLILRNEKYMGDALLQKTYTTDFLTKKRVKNDGSYAQQYYVENSHPAIIPRDIFMQVQQELDRRKSMKNKHSQCFSGKYALSGITVCGDCGNAYRRVHWKNRGTVWRCKSRVDKREHNCSGRTIYEKDLHEAIIKAINETLVDREYFLQQLSENINSVLTDGLTGRLEELDSKLKELESEIISMAIGGQGYDELATKILALRNERDMVEREIAADANMQQRIDEMGDFVKNHDTISEYSEVLVRRLIEKVTIFEKDIVVDFKSGVNIAIEI

SEQ ID NO: 305 - protein, 452 aa, Artificial Sequence
  Synthetic
MKAAIYIRVSTQEQVENYSIQAQTEKLTALCRSKDWDVYDIFIDGGYSGSNMNRPALNEMLSKLHEIDAVVVYRLDRLSRSQRDTITLIEEYFLKNNVEFVSLSETLDTSSPFGRAMIGILSVFAQLERETIRDRMVMGKIKRVESGLPLTTAKGRTFGYDVVDTKLYVNKEEAQHLQLIYDIFEEEKSITFLQKRLKKLGFKVKSYSSYNKWLMNDLYIGYVSYGDKVHVKGVHEPIISEEQFYRVQEVFSRMGKNPNMNKESSSLLNNLIVCEKCGLSFVHRVKDTVSRGKKYHYRYYSCKTYKHTHELEKCGNKTWRADKLEEIIIDRVKNYSFATRNVDKEDELDSINAKLKVEHLKKKRLFDLYINGSYEVAELDKMMADIDAQINYYNSQIEANEELKRNKKVQESLAELATVDFDSLEFREKQIYLKSIINKIYIDGEQVTIEWI

SEQ ID NO: 306 - protein, 487 aa, Artificial Sequence
  Synthetic
MKYAVYVRVSTDKDEQVSSIQNQIEICRYWIEKNGFEWDENSIYKDEAVSGTAWLERRAMQLILGKARKKELDTVVFKSIHRLGRDLRDALEIKEILLGHGVRLVTIEEGYDSYYEGKNDLKFEMYAMFASQLPKTLSVSISAALAAKVRRGEYTGGTVPYGYKIVDKKYVINQEEAEIVREMYELYDNGLGYLRISNALNDVGKYKRSGKLWTYSAVKLIITNPMYKGDYVMGRSTEVKVDGRKKRIQEPREKWVVFENHHPAIIERPLWDKINNPKINKKIKRRVAVTNELRGIARCIHCGSPFVLHTYKYKNKEGEELNYGYLTCGTYKLTGGRGCVKHSGLRYERLRSLVLRKLKEKERDLEKVFKLNDKDKHQEKQKKLRKEKKELEIKRERLLDLYLDGGSIDKETFTKRDANFAKNIKEKELEILKLDDVKALIVEQQKVKDAFKLLEDSENLYPVFKKLIAGIDISQNGAVDIRYRFEE

SEQ ID NO: 307 - protein, 452 aa, Artificial Sequence
  Synthetic
MKAAIYIRVSTQEQIENYSIQAQTEKLTALCRSKDWDVYDIFIDGGYSGSNMNRPALNEMLSKLHEIDAVVVYRLDRLSRSQRDTITLIEEYFLKNNVEFVSLSETLDTSSPFGRAMIGILSVFAQLERETIRDRMVMGKIKRIEAGLPITTAKGRTFGYDVIDTKLYINEEEAKQLRLIYDIFEEEQSITFLQKRLKKLGFKVRTYNRYNNWLTNDLYCGYVSYKDKVHVKGIHEPIISEEQFYRVQEIFSRMGKNPNMNRDSASLLNNLVVCGKCGLGFVHRRKDTVSRGKKYHYRYYSCKTYKHTHELEKCGNKIWRADKLEELIIDRVNNYSFASRNVDKEDELDSLNEKLKIEHTKKKRLFDLYISGSYEVSELDAMMSDIDAQINYYEAQIEANEELKKNKKIQENLADLATVDFNSLEFREKQLYLKSLINKIYIDDEQVTIEWL

SEQ ID NO: 308 - protein, 516 aa, Artificial Sequence
  Synthetic
MTGKQVTVIPMKPKKWVADNTEEKPKLKVAAYCRVSTEMEEQASSYEAQVQHYTDYIQKNPDWELAGIFADEGISGTDTKKRAEFNRMIDACKNGEIEYIITKSISRFARNTVDCLQYIRKLKELKIAVFFEKENINTMDAKGEVLLTIMASLAQQESQSLSQNTKMGVQYRFQQGQLRINHNHFLGYTKDEDGNLVVEPKEAEIIKRIFREYLEGSSLQDIAKGLMDDGILTGGKRKLWRAEGVRLILRNEKYMGDALLQKTFTVDFLTKKRVKNDGSYAQQYYVENSHPAIIPKDIFTQAQQELDRRKSMKNKNSQCFSGKYALTGITICGDCGNVYRRVHWKNRGTVWRCKSRVDKREHNCNGRTIYEKDLHQGILQAINETLIDRDVFLQQLTDNINSVLTDGLTEQLAGLDEQLKDLESEIISVAIGGQGYDELASQIFSLRDERDAVAKQIAANTNLQQRVDEMVVFVKEHDVINEYSEVLVRRLIEKVTIFEKNIVVDFKSGVRVTVEI

SEQ ID NO: 309 - protein, 452 aa, Artificial Sequence
  Synthetic
MKLLVTYIRWSTKEQDSGDSLRRQTILIDAFYSKHKNDYYLLPAHRYVDKGKSGFHQQHKAQGSDFRRMFENVMSGAIPEGSLIVVENFDRFSRADIDTAIDDVRQILRKGVSILTLGDGELYDKSALTDPVKLIKHIIIAERAHQESLVKQKRIAQVWNHKTQLARELKKPMGKQAPGWLELSEDGSHYIVDEDKASLVNIIYDKRLSGMSMFAICKWLNEQGYPTINQRKVRISKTKKPDGNWSALSVKHILTSRSVLGYLPAKISTEDRKTVLREEIEGFYPQIVTDSKFYAVQRLLEETGKGKTSSGEHWLYVNILKGLIRCRCGLVMTPTGIRKPVYQGTYRCNGNKESRCSYGTVSRKLLDTQLCSRLFSKLSQLHDEATDTAKLDELQRRLNTVDSELEKLTETLIQLPNITQIQEALRVKQEEKDELIVQLSREKGKRPISDVL

SEQ ID NO: 310 - protein, 389 aa, Artificial Sequence
  Synthetic
MVLVYKLDRLTRSVRDLLDLLEIFDQNNVAFRSATEVYDTTNAMGRLFVTLVGAMAEWERATITERTLYGKEGALEGGKFLGHVPFYYDLVDNKLIPNENRKYVDYIIKRLKENISATQIGKELSNMKNTPVKFNKTMVIQILHSPTAHGHTKYGKFFKENTHEPVITQEDYNTAIKILSTRRHTYKQNHASIFRGKIACPNNCGRFLHLNVNKIKRADGSYYLRQYYKCDKCSREKKPSTIIRYDMMQEAFMKYLNNLSFDTIEPPENNDDEEEFEIDIAKVMRQREKYQKAWAMDLMTDDEFKARMKETDKLLEEASEKEVENNELEFEQVIKIQKLLQKSWKNLSEDKKEDLIAATIDKIQIEIIRGNKTVNSPNEVKIKDVSFLL

SEQ ID NO: 311 - protein, 512 aa, Artificial Sequence
  Synthetic
MRTNEHNFHNIEEEIKHVAVYLRLSRGEDESELDNHKTRLLNRCELNNWSYELYKEIGSGSTIDDRPVMQKLLTDVEKNLYDAVLVVDLDRLSRGNGTDNDRILYSMKVSETLIVVESPYQVLDANNESDEEIILFKGFFARFEFKQINKRMREGKKLAQSRGQWINSVTPYGYKVNKTTKKLTPSEEEAKVVIMIKDFFFEGKSTSDIAWELNKRKIKPRRATEWRSSSIANILQNEVYIGNIVYNKSVGNKKPSKSKTRVITPYRRLPEEEWRRVYNAHQPLYSREEFDRIKQYFESNVKSHKGSEVRTYALTGLCKTPDGKTLRVTQGKKGTDDDLYLFPKKNKHGDSSIYKGISYNVVYETLKEVIVQVKDYLDSVLDQNENKDLVEELKEELMKKEDELETIQKAKNRIVQGFLIGLYDEQGSIELKVEKEKEIDEKEKEIEAIKMKIDNAKTVNNSIKKTKIERLLSDVQSAESEKEINRFYKTLIKEIIVDRTDENEAKIKVNFL

SEQ ID NO: 312 - protein, 570 aa, Artificial Sequence
  Synthetic
MTLPDIPSTFHGSAHAGEPWIGYIRVSTWKEEKISPELQRTAIEQWAARTGRRIVDWIVDLDESGRHFKRKIMGGIERIERREVRGIAVWRYSRFGRNRTGNAANLARVEAVGGLLESATEPVDASTAIGRFARGMYMEFAAFESDRAGEQWKETHEHRLAAKLPATGRPRFGYVWHRRRVPDPTAPSGIRLQDERYALHPDHASVVEELYERKIEDHDGFNSLVHWLNEDLAIPTMRGKAWGVSSVSRYLDSGFAAGFLRTHDKTCPCGYSSGTRSGCPDNRFIYLPGAQPRIIDPDQWEAYKEHRKTIKATPPRARKATYTLTGLLRHGYCRFHMSAASYTSHGKQLRGHLLVCSRHKYANRVDCPKGISVKREYVEGEVLTWLKREAAPGVGVGSSATVHRAEPVEDPRARVQRERGRLQAELSKIEGALDRLVADNAMNPEKYPADSFARVRDQFAGKKGSIMKALAELGEVETTPTREEYVPLMLDLIEAWPHMDAIERNAVLRQLVRRIVCHDIRAEGSRWIETRVEVHPVFEPDPWAPIVGEVVARKDEPAEVDDRADAVTLF

SEQ ID NO: 313 - protein, 478 aa, Artificial Sequence
  Synthetic
MNKVAIYVRVSTSVQAEEGYSIDEQIDKLKSYCQIKDWTVYDVYKDGGFSGGNINRPALEKMIIDAKKKRFDTVLVYKLDRLSRSQKDTLYLIEDVFSKNDISFLSLQENFDTSTPFGKAMVGLLSVFAQLEREQIKERMQLGMIGRAKSGKPMMFTNVSFGYTYSPKTQQLTINQAEAVIVKQIFNEFLGGMSPLRLMAYLNENNILRNGKEWNYQGIQRILRNPVYIGKIKYNNVIYPGLHEPIIDEESYYKAQKLLDARQDEMRVKGKNRQFKAKYMLSGTAKCGYCGAPLRIKIGNKRLDGTRLKVYQCCNRYPRKYAVVTYNDNKKCNSGNYQKEDLEQYVIAEIRKLQLKPEKIDKLFNKVSKIDTVQINKQIASIDKKINRLNDLYLNDMIDIDKLKADAEKFKEQKRVLEKELDKDLKIQEQEKNKEDFKKTIGFKDVTKLDYEEQSFIVKSLIDKILVKKGLIKILWKI

SEQ ID NO: 314 - protein, 451 aa, Artificial Sequence
  Synthetic
MQRVAIYMRVSTDQQAKHGDSLREQQETLDEYIKRNKNLKVVDKYIDGGISGQKLNRDEFQRLLDDVKNDQIDLILFTKLDRWFRNLRHYLNTQEILEKHNVSWNAVSQQYYDTTTAYGRTFIAQVMSFAELEAQMTSERIKSVFSNKIQQGEVVSGKVPLGYKIENKRLVPTSDKDIVIDLFDYYVRVGSLRKTTTYLEEKHGIVRDYQSVRKLLTNEKYIGKLRNNTNYCEPIIDKDIFETVQLRLSQNVKTSGSHDYIFRGLVRCADCDGSMSCSTLKSKYIKKTDGEVSYYIRSCYRCTRRRNNPTRCKNKKTYYERALERYLLDNIQTNIAMHVRTLKKEVTKKDSVKRKKDALFVKIERLKKAYLNEIIELDEYKRDRELLENEIASLKEPKINKNIAPLKKVLSDDFFEKYEKASINQKNELWRSIIESIEVSVDGNITINFLP

SEQ ID NO: 315 - protein, 449 aa, Artificial Sequence
  Synthetic
MLKRAALYIRVSTDQQAKHGDSLDAQIATLKDYVSTQDNLTIIDTYIDDGISGQKLYRDEFQRLLEDIKKNRIDIILFTKLDRWFRNLRHYLNIQEILDNSGVTWLAVSQPFFNTDTAYGRSFVNQSMSFAELEAQMASERIKAVFENKIRKGEVVTGSVPFGYKICDKKLIPNENAPIAKDIFKHHSIHNSIRLTVEYLFNEYDITRSSRTIKHMLRNRKYIGEVSGNKNYCPPIVDKETFEKVQNLLDKNISSIAKRTYIFSGLVVCSCCGKKMTGRYRKRKYIKKDGTVMYYTKKVYRCNGNTYKRNKCPNKINIAEEILEEYLLNNIKADAENFEAKQKKIAVSAPEKNNNSKILKKIERLKKAYLNEVISLDEYKKDRKELEQMMIQVKPKETIVFKSNWFNKNIESTYRDFDEEEKRFVWRSVLKNLIVDPHSKITINFLTKN

SEQ ID NO: 316 - protein, 515 aa, Artificial Sequence
  Synthetic
MKTAIYLRKSRADLEAEARGEGETLAKHRTTLLKIAKEMNLNVLSVREEIVSGESLVKRPEMLALLEEIEDNKYDVVLCMDMDRLGRGGMKEQGIILETFKRSNTKIMTPRKTYDLNDEWDEEYSEFEAFMARKELKIITRRMQRGRVASVEAGNYLGTHAPFGYDIHRLNKRERTLTINPEEASVVRMIFDWYANEDMGASAIRNKLNDLGYKSKLGNEWNPYSILDILKNNVYIGKVTWQKRKEVKRPDAVKRSCARQDKSDWIIADGKHEPIIPESLFEQAQEKLNSRYHVPYNTNGIKNPLAGIIKCSKCGYSMVQRYPKNRKETMDCKHRGCENKSSYTELIEKRLLEALKEWYINYKADFEAHKQGDKLKETQVIQMNEAALRKLEKELVDVQKQKNNLHDLLERGVYTVDMFLERSQVISDRINEITSTMENLKKEIKTEIKKEKVKKDTIPQVEHVLDLYFKTDDPKKKNSLLKSILEKAVYKKEKWQRLDDFELVLYPKLPQDGDI

SEQ ID NO: 317 - protein, 470 aa, Artificial Sequence
  Synthetic
MKGESKLDKKAAIYIRVSTQEQATEGYSIQAQTDRLTKYVEAKDFILYKKYIDAGYSASKLERPAMQELIQDVKSKKVDVVIVYKLDRLSRSQKDTMYLIEDIFRPNDVELISMQESFDTSTAFGSATVGMLSVFAQLERKSISERMITGRVERAKKGFYHTGGQDRPPAGYQFNSDNQLIINEYEAAAIKDLFRLYNDGLGKSSISEYLKKNYPGKNKWLPSSIDRMLKNSLYIGKVKFSGVEYDGIHEPIIDEVTFYKTQKEIARRKQSNTKRYNYVALLGGLCECGICGAKMANRRAVGRKGKVYRYYRCYSKKGSPKHMMKTDGCSSKAQQQFIIDEAVINNLKNIDVEAELKRRSAPQTNTSLISSQIESIDKQINKLIDLFQVDSMPLDVISEKIDKLNKEKQSMEKLLERKNRLDKTELQHRFDILKSFDWDNSSIESKRAVIEMLVQKVIIHDNSIEIILVE

SEQ ID NO: 318 - protein, 545 aa, Artificial Sequence
  Synthetic
MIAAIYSRKSKFTEKGESVENQIEMCKDYLKRNFTSIEDIKIYEDEGFSGKDTNRPEFKKMMEDAKNKKFSILICYRLDRISRNVADFSNTIEELQKYSIDFISLKEQFDTSSPMGRAMMNIAAVFAQLERETIAERIKDNMLELAKTGRWLGGTAPLGYKSEVIEYWNEDGKNKKMYKLATAENEIDIVKLIYKLYFKKRGFSSVATHLCKNKYKGKNGGEFSRETVRQIVINPVYCTADNKIFKWFKSKGATVYGTPDGIHGLMVYNKREGGKKEKPISEWVIAIGKHAGIISSDIWLKCQNIIEENKSKISPRSGTGEKFLLSGMIICGECGSGMSSWSHFNKKTNFMERYYRCNLRNRASNRCSNKMLNAYKAEEYISDYLKELDIDTLKEKYLKNKKSMATYDSSKQELAKLKNVLEDNNKLIKGLIRKLALLDDDIEIVTMLKNEIENIKKENNEINNNINKIKSSLEESDRENKFLKELEQSLLNFKKFYDFVDTSEKRALIKSLISTLVWYSKDEILELNPIGIKPNISQGVIKRRT

SEQ ID NO: 319 - protein, 508 aa, Artificial Sequence
  Synthetic
MKKAIAYMRFSSPGQMSGDSLNRQRRLIAEWLKVNSDYYLDTITYEDLGLSAFKGKHAQSGAFSEFLDAIEHGYILPGTTLLVESLDRLSREKVGEAIERLKLILNHGIDVITLCDNTVYNIDSLNDPYSLIKAILIAQRANEESEIKSSRVKLSWKKKRQDALESGTIMTASCPRWLSLDDKRTAFIPDPDRVKTIELIFKLRMERRSLNAIAKYLNDHAVKNFSGKESAWGPSVIEKLLANKALIGICVPSYRARGKGISEIAGYYPRVISDDLFYAVQEIRLAPFGISNSSKNPMLINLLRTVMKCEACGNTMIVHAVSGSLHGYYVCPMRRLHRCGRPSIKRDLVDYNIINELLFNCSKIQPVENKKDANETLELKIIELHMKINNLIAALSVAPEVTAIAEKIRVLDKELRRASVSLKTLKCKAVSSLGDFHAIDLTSKNGRELCRTLAYKTFEKIIINTDNKTCDIYFMNGIVFKHYPLMKTISAQQAISTLKYMVDGEVYF

SEQ ID NO: 320 - protein, 471 aa, Artificial Sequence
  Synthetic
MRKVAIYSRVSTINQAEEGYSIQGQIEALTKYCEAMEWKIYKNYSDAGFSGGKLERPAITELIEDGKNNKFDTILVYKLDRLSRNVKDTLYLVKDVFTANNIHFVSLKENIDTSSAMGNLFLTLLSAIAEFEREQIKERMQFGVMNRAKSGKTTAWKTPPYGYRYNKDEKTLSVNELEAANVRQMFNMIISGCSIMSITNYARDNFVGNTWTHVKVKRILENETYKGLVKYREQTFSGDHQAIIDEKTYNKAQIALAHRTDTKTNTRPFQGKYMLSHIAKCGYCGAPLKVCTGRAKNDGTRRQTYVCVNKTESLARRSVNNYNNQKICNTGRYEKKHIEKYVIDVLYKLQHDKEYLKKIKKDDNIIDITPLKKEIEIIDKKINRLNDLYINDLIDLPKLKKDIEELNHLKDDYNKAIKLNYLDKKNEDSLGMLMDNIDIRKSSYDVQSRIVKQLIDRVEVTMDNIDIIFKF

SEQ ID NO: 321 - protein, 644 aa, Artificial Sequence
  Synthetic
MLRPICYERVSSIQQIEGGGGLDDQRSALEGYLDKNAGLFENDRLFIQDRGVSAFKNSNISSESQLGIFLQDVQNRKYGEGDALIVMSLDRISRRSSWAEDTIRFIVNSGIEVHDISASTVLRKDDPHSKLIMELIQMRSHNESLMKSVRAKAAWDRKIIEAVQNGTVISNKMPMWLKNVDNRYQVIQEKADLIIRCFEWYRDGFSTGEIVKRIADPKWQMVTVSRLVRDRRLLGEHKCYNDEVIHNVYPKVIDDDLFLTANRMMDRVMLEKNKPAEDLLLESDVVQEIFQLYESGLGSGAIVKRLPKGWSTVNVLRVLRDKNVVTQKIIDNLTFERVNQKLSMNGVANRIRKDITIAQDDYITNLFPKILKCGYCGGNVAIHYNHVRTKYVICRNREERKICDAKSIQYIRIEKNILKCVKNVDFQKLMIESTGSETSVLDGLHEELSSLRREENSYSDKINERKLAGKRVGIHLNDGLTEVQDRIEEIEKEIINAQTVREIPKFDFDMDEVLDPMNIELRAKVRKQLRLVLKAVKYWMFDKRIFIQLEYFNDVLSHMLVIDNKRGGGDVIYEMSIEERKGERIYTVHENGHAVFIASVTIGTDIWSLALSRTRTIDSIGNYLSLLAREGFEIFVNEDQIDWF

SEQ ID NO: 322 - protein, 496 aa, Artificial Sequence
  Synthetic
MYGYNLKPCLTRRNTLKRMEQITPPPISASPLVKVAAYARISMETERTPLSLSTQVSYYQQLIHDTPGWTFAGVFADSGISGTTTHRPQFQEMLALAREGAIDLILTKSISRFARNTVDLLETVRELKDLGVEVRFEKENISSTSADGELMLTLLASFAQAESEQISQNVKWRIWKGFEEGKANGFHLYGYTDSADGTDVQIIEEEAAVVRWIFAQYMKETSCEKMAAQLIADGRVPHLADNKLPGEWVRHILKNPHYTGDLLLGRWSTPEGRPGRAVRNTGQLPQYLVENAIPAIIDRDTFVAVQTEIARRRELGARANWSIETVALTSKIKCVSCNCSFVRNVRNPKTQNSISTEHWICTERKKGRKTGCGTCEISDTALKGFIAQVLGIEAFDEDVFNERIDHIDVQGKDHYTFQYTDGTSSSHTWRPNLKKSSWTPARKAAWGELVRARWAEAKRLGLDNPRQAPTPPEALAKYRAVAKAEAERLRAERGER

SEQ ID NO: 323 - protein, 463 aa, Artificial Sequence
  Synthetic
MKVAIYTRVSSAEQANEGYSIHEQKRKLISFCEVNDWNRYEVFSDPGVSGGSMERPSLQKLFDRLEEFDLVLVYKLDRLTRNVRDLLEMLEVFEKNNIAFKSATEVFDTTSAIGKLFITIVGAMAEWERETIRERSLMGSHAAVRSGKYIRAQPFCYDLIDDKLKPNQHAKYIRFMVDKLMIGKSASEVVRQLESKKKPPGITKWNRKTVLNWIKNPVMRGHTKFGDLLIENTHEPIISEDEYLKLIDIIEKRTYKTKSKHKAIFRGVLECPQCQSKLHLSRSIKKYDSGKTLEVRRYSCDKCHRDNSVKNISFNESEIEREFINTLLKKGTDNFKISVPKKKSYDIEDNKVKINEQRANYTRSWSLGYIKDEEYFMLMDETENLLKDIEEKAKSHTDEKLNEEQIRTVKNLLIKGFKIATLEDKEDLITSSVDVIKFEFIPKKFNKNKPLNTVKINEIQFRF

SEQ ID NO: 324 - protein, 490 aa, Artificial Sequence
  Synthetic
MVIVAYAVYVRVSSDKDEQVSSVENQIDICRYWLENNGFEWDENAVYFDDGISGTAWLERHAIQLVLEKARKKEIDTVVFKSIHRLARDLKDALEIKEILLGHGVRLITIEEGYDSHYEGKNDMKFEMYAMFASQLPKTLSVSITAALAAKVRRGGYTGGFVPYGYEIIDGKYAINEEEAALVREIFELYAQGFGYIKIANTINDKGARTRKGAPWTFSTLSKMIKNPAYKGTYIMQKYGTVKVNGRKKKVINPKEKWVIFEDHHPAIISHELWEKVNNKDPNKFKKKRRVSTTNELRGITVCAHCGTAMSKRNSINISKNGTETEYSYMICNWSRITARRECVRHVPIHYKDLRALVLSKLKEKEKDLDKEFGSDENQLQVKLRKLKKDINDLKFKRERLLDLYLEDERIDKDTFTIRNAKIEKEIGLKEMEIRKASNIEIQMKEKQEVRDAFALLEESKDLHSVFQKLIKRIEVAQDGAIDIYYRFEE

SEQ ID NO: 325 - protein, 465 aa, Artificial Sequence
  Synthetic
MYYERSYLRSCQVSTLEQKEHGYSIEEQERKLRSYCDINDWNVKDVYVDAGFSGAKRDRPELKRLLNDIKHFDLILVYKLDRLTRSVRDLLDLLEVFENNDVAFRSATEVYDTTTAMGRLFVTLVGAMAEWERETIRERTQMGKLAALKKGIMLTTPPFYYDRVDNKFVPNKYKEVVLFAYEEALKGKSAKSIARKLNNSDIPPPNNRKWEDRSITRALRSPFTRGHFEWGGVYLENNHEPVITQEMYNKIKDRLNERVNTKVVAHTSVFRGKLTCPTCGTKLTMNTNKKKTRNGYTTHKSYYCNNCKITPNLKPVYIKEREVLRVFYDYLLNLNLEKYEIDEKQSEPEITVDIHKVMEQRKRYHKLYANGLMQEDELFDLIKETDEAIKEYESQTENKVEKQFDIEGVKKYKKLLLEMWNVSTLEDKAEFVQMAIKSIEFDYIIDDGPPTSRKHSLKINQIIFY

SEQ ID NO: 326 - protein, 506 aa, Artificial Sequence
  Synthetic
MKPRQWAAENTEEKPKLKVAAYCRVSTEMEEQASSYEAQVQHYTDYIQRNPDWELAGIFADEGISGTGTKKRDGFNRMIEACQKGDVEYIITKSISRFARNTVDCLQYIRQLKDLHIAVFFEKENINTMDAKGEVLLTIMASLAQQESQSLSQNTKMGVQYRFQQGQLRINHNHFLGYTKDEDGNLVIEPKEAEVIKRIFREYLEGSSLQEIANGLMSDGILTGGKRKLWRGEGVRLILRNEKYMGDALLQKTYTTDFLTKKRVKNDGSYAQQYYVENSHPAIIPRDIFMQVQQELDRRKSMKNKHSQCFSGKYALSGITVCGDCGNAYRRVHWKNRGTVWRCKSRVDKREHNCSGRTIYEKDLHEAIIKAINETLVDREYFLQQLSENINSVLTDGLTGRLEELDSKLKELESEIISMAIGGQGYDELATKILALRNERDMVEREIAADANMQQRIDEMGDFVKNHDTISEYSEVLVRRLIEKVTIFEKDIVVDFKSGVNIAIEI

SEQ ID NO: 327 - protein, 514 aa, Artificial Sequence
  Synthetic
MAKELTKTASVAAYLRKSREDADQDDTLARHRKQLIDLVKQRGFENVDWYEEIGSADSIKNRPVFSDLLKKIENDEYDAVCVVAYDRLSRGNQIESGIISKAFKDTETLLITPTRTYDWSIEGDEMLSEFESMIARSEYRVIKKRLKQGKINAVKNGRLHSGNVPYGYKWDKNDKTAKIDKEKHEIYRLMVKWFLDEEYSATEIADKLNELGIPSPSGGSTWYSEVVADILTNDFHRGLVWYGKYRARKNGIGIEKNPDSSSIIMHKGNHEPMKSDEEHGAIIRRISKLRTFKPGRKLNKNTFKLSGLVRCPRCGKVQVVHTPKNRNPHVRKCLKKSKTRTTECNNTTGIPEEALYKAIVMKIREYNEVLFSKDSSEKKDEEARTYMNQILSLHEKAISKSNKRIEKIKEMYMDEIIDKDEFKSRIDKEKKSILEAENEIRTLKESADYHDEIEHEQRKIKWNHEKVQEFIESDQGFTPSEINLILKLIISHVSYTMVKNEYGEFDVDLRVNFN

SEQ ID NO: 328 - protein, 478 aa, Artificial Sequence
  Synthetic
MNKVAVYVRVSTTSQLEEGYSIEEQKAKLESYCDIKDWNIYKIYTDGGFSGSTTDRPALEQLVQDAQSKLFDTVLVYKLDRLSRSQKDTLYLIEDIFLKNDIEFVSLLENFDTSTPFGRAVIGLLSVFAQLEREQIKERMQLGKLGRAKSGKSMMWAKTSYGYDYDKETGSMTVNEFEALAVKEIYASYLSGISITKLRDKMNAEYPKKPAWSYRTIRGILANPVYCGLNQYKGQTFQGTHKAIISLDDFEETQRELKKRQQTAQERLNPRPFQAKYMLSGLAQCGYCHAPLKVVLGQKRKDGTRTKRYECYQRHPRTTRGVTVYNDNKKCNSGYYYMDILEHYVLTRIAMLQNDPDKIQEIFSGGTSPVIDKQAIQKQIDSLSLKLSKLNDLYLDDRITLDELRSKSSDFIKQRAILEEEIKKASTDKQVGRRKKIEKLLDASSVFEMSYDNQKVIVRELIEKVQVTSDKIVIRWKI

SEQ ID NO: 329 - protein, 468 aa, Artificial Sequence
  Synthetic
MTVGIYIRVSTQEQANEGYSIGAQKERLIAYCAAQGWNDFKFYIDEGISAKDMNRPELQRLLDDVKNRRISMILVYRLDRFTRRVKDLYEMLEMLDKHNCSFKSATELYDTSNAMGRMFIGLVALLAQWETENLSERIKVALEQKVSDGERVGAIPYGFDLTEDEKLIKNEKSKVVYDMIEKTFNGMSATQLANYLNKTNDDRTWHVKGVLRILKNPAIYGATRWNDKVYENTHEGIISKSQYKKLQEILNDRSKHHRREVTGNYLFQGKLSCPTCKKPLAVNRYLRKRKDGTEYQSTIYKCSSCYLKGKKIKQIGEKRFLDALYIYMKNIDLKGIEITEEPDETKHLTDQLKSLEKKREKYQRAWASDLISDSEFEHRMLETRELFEELKRKLSEKKKPIQVDIEEIKNVVFTFNQTFHFLTQEEKRMFISRFIKKIDYELIPQPPQRPDRCKYGKDLVTITDVLFY

SEQ ID NO: 330 - protein, 454 aa, Artificial Sequence
  Synthetic
MSDSLIRRLRCAVYTRKSTDEGLDQEYNSIDAQRDAGHAYIASQRAEGWIPVADDYDDPAYSGGNMDRPAIKRLMADIEAGKIDIVVIYKIDRLTRSLTDFARMVDVFERHGVSFVSVTQQFNTTTSMGRLMLNILLSFAQFEREVTGERIRDKIAASKRKGMWMGGIPPIGYDVVNRRLVLNDGEAKLVRHIFRRFGEIGSSTLLVKELRLDGVTSKAWTTQDGKVRKGRPIDKALIYKLLHNRTYLGELRHRDQWYPGEHPSIIDSELWDRVHAILSTNGRARASATRAKVAKVHCLLRGMVFGSDGRALSPISTVKKDGRRYRYYVPQREKKEHAGASGLPTLPAAELEAAVLDQLRAILRSPGLIGDMLPRAIALDPSLDEAMVTVAMTRLDAIWDQLFPAEQTRIVNLLVEKVIVSPDDLEVRLRANGIERLVLELRPATNGGAEEVMA

SEQ ID NO: 331 - protein, 521 aa, Artificial Sequence
  Synthetic
MWQENPPNDASPSSVTYRAAEYVRMSTEHQQYSTENQADKIREYAERRGIQIVRTYADEGKSGLSIDGRQALQQLIRDVESGQADFNAILVYDVSRWGRFQDADESAYYEYICKRAGIQVTYCAEQFENDGSPVSTIVKGVKRAMAGEYSRELSAKVFAGQCRLIELGYRQGGPAGYGLRRVLVDQSGTFKGELVRGEHKSLQTDRVILMPGPEQEVATVNQIYRWFVDDGLTESEIASRLNAGCVPTDLGREWTRATVRQVLSNEKYIGNNIYNRISFKLKKHRVVNEPEMWIRKDGAFEAIVPPDIFYTAQGILRARSHRYSNEELLEKLRNLFRQRGVLSGLIIDEAEGMPSTAAYIHRFGSLLRAYEAVGFTPDRDYRFLEVNQFLRRLHPEIISQTERMILDLGGSVQRDLATDLLDVNREFTVSMVLARCLVLDNGRRRWKVRFDASLLPDITVAVRLDESNESPLDYYLLPRLDFGQPGISLADHNRIEYESYRFENLDYLYGMAERYRLRRAA

SEQ ID NO: 332 - protein, 539 aa, Artificial Sequence
  Synthetic
MAKVYSYMRFSDPRQATGSSADRQLAYASAWASKHGMELDATLTLRDEGLSAYHETHVKQGALGAFLRAIDAGRIPVGSVLIVEGLDRLSRAEPLLAQAQLGQIVSAGITVVTASDGREYNRDGLKAEPMNLVYSLLVMIRAHEESDTKSKRVKAAVRRQCEAWVAGSYRGRIVSGKDPQWLTWGGDSWQFIPERVEAVRFALDAYRSGIGAARLVRLMHEKGMVLSDWGIAAQQVYRLVRLPALRGAKRISIDGEDFMLEDYYPRLLSDEEFSELETLVGQRYRRRGKDEIVGIVTGIGITRCGYCGTALVAQNLMQRVKADGSLVDGHRRLHCVSYSKNGGCNAGSCSSVPIEHAVLAYCSDQMNLQRLLEPSSADEELRTRLAEAQQGVAEVERQLQRVTDALVADDSGAAPLSFVRKARELEEELERRRSAVRVLERELVAMASSVPVAEASKWAELAEQAKSVSNVEAREQARQLVMDTFERIVVYMRGVVPEGRRSKYIDVLLVSRAGQSRWLRVGRRTGAWSAGGDWNGSAP

SEQ ID NO: 333 - protein, 543 aa, Artificial Sequence
  Synthetic
MGKNGARVYSYLRFSDPRQATGSSADRQLAYASAWASKHGMELDATLTLRDEGLSAYHETHVKQGALGAFLRAVDEGRIPAGSVLIVEGLDRLSRAEPLLAQAQLGQIVNAGITVVTASDGREYNREGLKAEPMNLVYSLLVMIRAHEESDTKSKRVKAAVRRQCEAWVAGSYRGRIVSGKDPQWLAWDGDSWQFIPERVEAVRFALDAYRSGIGAARLVRLMHEKGMVLSDWGIAAQQVYRLVRLPALRGAKRISIDGEDFMLEDYYPRLLSDEEFSELETLVGQRYRRRGKDEIVGIVTGIGITRCGYCGTALVAQNLMQRVKADGSLEDGHRRLHCVSYSKNGGCNGGSCSSVPIERAVLAYCSDQMNLQRLLEPSSAGEDLRPRLVEAQKVVAEIERQLERVTDALLADDSGAAPLAFVRKARELEEDLERRRSAVRALEQELVAKSASAPAAGASKWAELAERAKSMVDVDAREQARQLVMDTFETLVVYMRGVIPNPKGRYIDVMMKSRAGQTRWIRVDRRTGVWKEGADRPTTRRS

SEQ ID NO: 334 - protein, 543 aa, Artificial Sequence
  Synthetic
MSKARVYSYLRFSDPKQAAGSSADRQIEYARRWAAERNLELDDTLSLRDEGLSAYHQRHVKQGALGVFLSAAEGGRIAPGSVLIVEGLDRLSRAEPIQAQAQLAQIVNAGITVVTASDGKEYNRERLRSQPMDLVYSLLVMIRAHEESDTKSKRVKAALRRQCQQWIDGKWRGIIRSGRDPHWVEIRDGQFALVPERVAAVREALALFSRGHGKTKILRTLTERGLSMSNAGNHGTFIYRLVRNPMLMGTRVFEIDKEEFRLQGYYPALLSPEEFAVLQHLADERKGTRVKGEIPGLLTGLGITHCGYCGAAMVAQNYMGRARKADGTPQDGHRRLHCVSDSQNSGCVVAGSVSIVPIERAIMTFCADQMNLTKLIEGDDGSAAVAGRLALARQKASGLQAQLERLTTALLADDGNAPPATFLRRARELEEQLSAERRVIESLEREVLASASTTAPAAADVWAKLTHGVLALDYESRVRARQLVADTFSRIVIYHAGFRPGEGTEKRIGIQLVAKHGNVRMLDVDRKSGGWRAAEDFDLRALT

SEQ ID NO: 335 - protein, 470 aa, Artificial Sequence
  Synthetic
MKGESELDKKAAIYIRVSTQEQATEGYSIQAQTDRLTKYVEAKDFILYKKYIDAGYSASKLERPAMQELIQDVQSKKVDVIIVYKLDRLSRSQKDTMYLIEEIFRPNDVELISMQESFDTSTAFGSATVGMLSVFAQLERKSISERMITGRVERAKKGFYHTGGQDRPPAGYQFNSDNQLIINEYEAAAIKDLFRLYNDGLGKSSISEYLKKNYPGKNKWLPSSIDRMLKNSLYIGKVKFSGAEYDGIHEPIIDEVTFYKTQKEIARRKQSNTKRYNYVALLGGLCECGICGAKMANRRAVGRKGKVYRYYRCYSKKGSPKHMMKTDGCSSKAQQQFIIDEAVINNLKNIDVEAELKRRSAPQTNTSLISSQIESIDKQINKLIDLFQVDSMPLDVISEKIDKLNKEKQSMEKLLERKNKLDKTELQHRFDVLKSFDWDNSSIESKRVVIEMLVQKVIIHDNSIEIILVE

SEQ ID NO: 336 - protein, 481 aa, Artificial Sequence
  Synthetic
MKTTNKVAIYVRVSTTSQVEEGYSIEEQKDKLESYCKIKDWSVYKVYTDGGFSGSNTNRPAIEQLIKDAQKKKFDTVLVYKLDRLSRSQKDTLHLIEDVFIKNGIEFLSLQENFDTSTPFGKAMIGLLSVFAQLEREQIKERMQLGKIGRAKAGKSMMWAKTSYGYDYHRETGTITINPAQALTIKFIFESYLRGRSITKLRDDLNEKYPKHVPWSYRAVRTILDNPVYCGFNQYKGEIYPGNHESIISKEEYDKTQSELKIRQRTAAENVNPRPFQAKYILSGIAQCGYCGAPLKIMLGVKRKDGSRLKKYECHQRHPRTLRGVTTYNDNKKCDSGFYYKDKLEAYVLTEISKLQDNAVYLDKIFSGDNAETIDRESYKKQIEELSKKLSRLNDLYIDDRITLEELQSKSAEFISMRGTLETELENDPALRKNKRKADMRKLLNAEKIFSMDYEGQKVLVRGLINKVQVTAEDIVINWKI

SEQ ID NO: 337 - protein, 460 aa, Artificial Sequence
  Synthetic
MLIQTKIRRFNMKKVFVYHRVSSDQQLDGSGIARQAELLEGYLERTGICAEMDDPAPVVLSDQGVSAFKGLNISEGELGAWMEQVRNGMWDSSILVVESIDRFSRQNPFDVMGYINALMAHNVAIHDVMANIVISRSNSKDLPFVMMNAQRAYDESKYKSDRIRKGWAKKREQAFNKGTIVTNKRPQWIEVENDKYVLNHKAAVVKEIFALYQTGMGCPTIAKQLQTKEGEQYKFNRPWTGELVHKILTNRRVTGKIFISEIIRNHDDIENPVTQKKYDMDVYPVVINEEEFELVQELLKSRRPNAGRVTVKKDGQEEVLIKSNLFSGIARCTECGGPMYHNVVRAKRTPKKGDPKIEEYRYIRCLNERDGLCENKAMTYETVERFVVEHLLSMDLNTVIKEQEFNPEIEVIRIQIDQVKDQITKEGANKQVISSQADSLIKISRIWADFFPANTSNQPI

SEQ ID NO: 338 - protein, 532 aa, Artificial Sequence
  Synthetic
MKLPDTFRSPPPDEEGEAYIGYVRVSTYKEEKISPELQREAILAWAKKTRRRIVKWVEDLDVSGRHFKRKITKCVEDVEAGTVQGVAVWKYSRFGRDRTGNALWLARLEEVGGQLESATEPVDATTAIGRFQRGMILEFAAFESDRAGEQWRETHNYRKYTLGLPAQGRARFGYVWHRRFDAATGVLQKERYEPDPETGPLVASLYHLYVAGTGFATLVIKLNEGGHQTIQGARWTNETLTRHMDSGFAAGLLRVHNPECRCRNTGGSCRNKIYIQGAHEELIDWDIWEAYQRRRAVVRASHPRARNSLYTLTGLPSCGGCRWGASVTNTSYGGEYRRAFAYRCGLRAKAGATACDGVFIVRTKVEHAVEEWLMDKAARGIDMAPSTGPGPTLTPIDDQAARARARVSAQADVDRHRAALARLRAEHAELPEDWGPGEYEDAVDVIRKKRAEAQSILDNLPDADPAPDRAEAQQLIASTAEAWPALDDRQKNALLRQMIRRVVLTRTGRGTADIEVHPLWEPDPWSKQVSPT

SEQ ID NO: 339 - protein, 465 aa, Artificial Sequence
  Synthetic
MNVAIYCRVSSQEQANEGYSIHEQERKLKSFCEVNNWKNYKVFVDAGVSGGTINRPAFNNLLANLDKFDLVLVYKLDRLTRSVRDLLSLLETFEEHGVSFRSATEVFDTTSAIGKLFITIVGAMAEWERSTIRERSLFGSHAAVREGNYIRVAPFCYDNIDGKLVPNEHKKVIEYIVKKLLEGVTATEIARRLNNANNYPPTIKNWSKTTVIRLVNNPVMRGHTKHGDLFIENTHEPIITEHNYKRISERLSSRVNYKKQTHTSVFRGVLECPQCGHKLHYFKSKLKNKNKTYYSEGYRCDYCRTDKTARNIAITFSEIEREFIEYMSNIRLSENYCIEVEPKNEVVKIDINKIMRKRSRFQEAYGDGLMTKEEFKQKMFETQKLIDEYEGMENEKDVDDHITKEQVQAIQNLFRHIWDSPSVSREDKEEFVRQSIKKIDFDFIPKSKVNKTPNTLKINNIDLHF

SEQ ID NO: 340 - protein, 517 aa, Artificial Sequence
  Synthetic
MKTIHKLARPQLPEPPKLKVAAYARVSTSSNEQLASLQTQITHYENHIQNNDQWEYVGVYYDEGTSGTKVEKRDGLHRLIKDAELGKIDLILTKSISRFSRNTVDCLNLVRKLTDIGVTIFFEKENINTGDMESELLLSILSSLAESESYSHSENMKWANRKRMAKGIFKTVPPYGYQRKGADFYLIPDEAKVIEQIFKWALEGVSAYQVAKRLNEKNIFTRKGSKWQDSGINNILHNIVYTGTMIHQRYFNDDQFRKKKNNGELPMYRIDNNHPPIISWEDYERVQELITLRANAKGTSKGSQKYSQRYVFTKRIICDKCGCNYKRVHIAGKGNTKVVKWSCTGHLKNKDGCYALPITDESLKTAYLTMLNKLILGHTIVLEPLINTPVEGKASKQELEKLSIEITKIDEKLEVLASLNASGVVSTKTALEEQGRLQMELNKLQEKQHKIMESVNGTSTQRIQLEQLHQFTKRSEMLTEWDEDLFLRFAELIVVYSRQEVSFELKCGLLLKERLEA

SEQ ID NO: 341 - protein, 506 aa, Artificial Sequence
  Synthetic
MKPRQWAAENTEEKPKLKVAAYCRVSTEMEEQASSYEAQVQHYTDYIQRNSDWELAGIFADEGISGTGTKKRDGFNRMIEACQKGDVEYIITKSISRFARNTVDCLQYIRQLKDLHIAVFFEKENINTMDAKGEVLLTIMASLAQQESQSLSQNTKMGVQYRFQQGQLRINHNHFLGYTKDEDGNLVIEPKEAEVIKRIFREYLEGSSLQEIANGLMSDGILTGGKRKLWRGEGVRLILRNEKYMGDALLQKTYTTDFLTKKRVKNDGSYAQQYYVENSHPAIIPRDIFMQVQQELDRRKSMKNKHSQCFSGKYALSGITVCGDCGNAYRRVHWKNRGTVWRCKSRVDKREHNCSGRTIYEKDLHEAIIKAINETVVDREDFLQQLSENINSVLTDGLTGRLEELDSKLKELESEIISMAIGGQGYDELASQIFSLRDERDAVAKQIAANTNLQQRVDEMVVFVKEHDVINEYSEVLVRRLIEKVTIFEKNIVVDFKSGVRVTVEI

SEQ ID NO: 342 - protein, 540 aa, Artificial Sequence
  Synthetic
MKAAIYSRKSVFTGKGESVENQIQMCKEYGEKNLGIKEFVIYEDEGFSGGNTKRPKFQELLRDVKKKKFDTLICYRLDRISRNVADFSTTLELLQDNNISFVSIKEQFDTSTPMGKAMVYIASVFAQLERETIAERIRDNMLELAKTGRWLGGQTPLGFKSEKISYFDAEMKERTMYKLSPENKELELVKLIYNKYLETGSIHLTLKYLLSNSIKGKNGGEFASMSINDILRNPVYVRSNQMVIDYLKDKGMNVCGTANGNGILIYNKRNSKYKKKDINEWIAAVSKHKGIIPANTWIEVQKTLDKNSSKSTPRQGTSKKSILSGVLKCSRCSSPMRVTYGRKRKDGTSIYYYTCTMKAHSGKTRCDNPNVRGDYLEKAIIKKLQNLNSDVVIKELEEYKKQLAATTENSIIKNISKEIEEKKKEMDSLLKQLSKVESPVASEFIISKVDSLGTEIKDLEISLTKTNSKKKENSNIELNIEIVLQSLKEFNTFFNSVESLKTDELTIQRKRYLLERAVDEITIDGETKKIGIDLWGSKKK

SEQ ID NO: 343 - protein, 545 aa, Artificial Sequence
  Synthetic
MELKNIVNSYNITNILGYLRRSRQDMEREKRTGEDTLTEQKELMNKILTAIEIPYELKMEIGSGESIDGRPVFKECLKDLEEGKYQAIAVKEITRLSRGSYSDAGQIVNLLQSKRLIIITPYKVYDPRNPVDMRQIRFELFMAREEFEMTRERMTGAKYTYAAQGKWISGLAPYGYQLNKKTSKLDPVEDEAKVVQLIFKIFLNGLNGKDYSYTAIASHLTNLQIPTPSGKKRWNQYTIKAILQNEVYIGTVKYKVREKTKDGKRTIRPEKEQIVVQDAHAPIIDKEQFQQSQVKIANKVPLLPNKDEFELSELAGVCTCSKCGEPLSKYESKRIRKNKDGTESVYHVKSLTCKKNKCTYVRYNDVENAILDYLSSLNDLNDSTLTKHINSMLSKYEDDNSNMKTKKQMSEHLSQKEKELKNKENFIFDKYESGIYSDELFLKRKAALDEEFKELQNAKNELNGLQDTQSEIDSNTVRNNINKIIDQYHIESSSEKKNELLRMVLKDVIVNMTQKRKGPIPAQFEITPILRFNFIFDLTATNNFH

SEQ ID NO: 344 - protein, 470 aa, Artificial Sequence
  Synthetic
MKGESELDKKAAIYIRVSTQEQATEGYSIQAQTDRLTKYVEAKDFILYKKYIDAGYSASKLERPAMQELIQDVQSKKVDVIIVYKLDRLSRSQKDTMYLIEDIFRPNDVELISMQESFDTSTAFGSATVGMLSVFAQLERKSISERMITGRVERAKKGFYHTGGQDRPPAGYQFNSDNQLIINEYEAAAIKDLFRLYNDGLGKSSISEYLKKNYPGKNKWLPSSIDRMLKNSLYIGKVKFSGAEYDGIHEPIIDEVTFYKTQKEIARRKQSNTKRYNYVALLGGLCECGICGAKMANRRAVGRKGKVYRYYRCYSKKGSPKHMMKTDGCSSKAQQQFIIDEAVINNLKNIDVEAELKRRSAPQTNTSLISSQIESIDKQINKLIDLFQVDSMPLDVISKKIDKLNKEKQSMEKLLERKNKLDKTELQHRFDVLKSFDWDNSSIESKRVVIEMLVQKVIIHDNSIEIILVE

SEQ ID NO: 345 - protein, 524 aa, Artificial Sequence
  Synthetic
MAGAKNITVIPARKRVGNTATPDNKPKLKVAAYCRVSTDSDEQATSYDAQVEHYTEFIRKNFEWEFAGIYADDGISGTNTKKREEFNRMIEDTMAGKIDMIITKSISRFARNTLDCLKYIRQLKEKNVPVFFEKENINTMDSKGEVLLTIMASLAQQESESLSKNVKMGLQFRYQNGEVQVNHNWFLGYTKDENGHLIIDEEQAVVVRRIFREYLQGASLKSIADGLMADGIPTATGNKKWRGDGIRKILTNEKYMGDALLQKTYTVDVLTKKRVSNNGIVPQYYVENNHEAIIPRQLFMQVQEELLRRAHLKTENGKTKRVYSSKYALSSIVYCGKCGDLFRRVAWKARGASYNKWRCASRIEKGPKEGCDADAISEVELQNAVVRAINKTLGGREQFLLQLQHNIEEVLNGDSTATLEYIDQRMAKLQEKLVMCVNKNVEYDVIANEIDALREKKASVVTKDAEQEMLKKRIDEMRQFLQTQTNRVTEYDEQMVRRLIEKITVFDDKLIFEFKSGMTIELKR

SEQ ID NO: 346 - protein, 520 aa, Artificial Sequence
  Synthetic
MRNVTKIDQVDLSIFKRLRVAAYCRVSTDSNEQELSLDTQRKHYESYIKANSEWEYAGIYYDDGISGTKTAKRDGLLRLVEDCEKGLIDLVITKSISRFSRNTTDCLTLVRKLLNYDVYIIFEKENIHTGSMESELMLAILASMAESESRSISENEKWSIKKRFQNGTYVISYPPYGYANVNGEMVIVPEQAEVVKEIFAGCLAGKSTHVIAKELNEKGVPSKKGGKWTGGTINGILTNEKYIGDALFQKTITDAAFKRKRNYGEEEQYYCEEHHEAIIDRETFEKAKEAIRQRGLGKGNCSEDISKYQNRYAMSGKIKCGECGRSFKRRYHYTSHGRSYNAWCCSGHLEDSKSCSMKYIRDDDLKRVFLTMMNKLRFGNDLVLKPLLIAITTDNSKKNIHSVEEIEKEIAANEEQRNHLSTLLTRGYLERPVFTDAHNKLITEYEHLLAKRDLLYRMDDAGYTMEQKLKELVDFLNGTEPFTEWDDTLFERFIEKVNVLSRDEVEFEFKFGLRLKERMD

SEQ ID NO: 347 - protein, 690 aa, Artificial Sequence
  Synthetic
MNTKITPQHQSKPAYIYIRQSTLAQVRHHQESTERQYALRDKALALGWPETAIRVLDRDLGQSGAQMTGREDFKTLVADVSMGNVGAVFALEVSRLARSNLDWHRLLELCALTHTLVIDADGCYDAGDFNDGLILGLKGTMAQAELHFLRGRLQGGKLNKAKKGELRFPLPVGLCYGDDGRIVLDPDDEVRGAVQLAFRLFQETGSAYAVVKRFAEEGLRFPKRAYGGAWAGRLIWGRLSHGRVLGLIRNPSYAGIYVSGRYQYRQRITAQAEVHKHVQPVPKTEWRVHLPDHHDGYITPEEFERNQEHLAQNRTNGEGTVLSGAAREGLALLQGLLICGGCGRALTVRYQGNGGLYPLYLCSARRREGLATTDCMSMRSELLDNAIGEAVFTALQPAELELAVTALSELEQRDHAIMRQWHMRIERAEYEVALAERRYQECDPANRLVAGTLERRWNDAMLHLEAIRTESAQFQSQKALVATSEQKAQVLALARNLPRLWRAPTTSAKDRKRMLRLLIRDITVERRSATRQALLHIRWQGSACTDITVDLPKPAADAMRYPAAFVEQVRELSQHLPDRQIVAHLNQEGLRSSTGKSFTLEMVKWIRYRYRIEVTCFKRPDELTVQQLAHRLHVSPHVVYYWIERQVVQARKLDGRGPWWIALDAAKERQLDDWVRTSGHLQRQHSNTQL

SEQ ID NO: 348 - protein, 450 aa, Artificial Sequence
  Synthetic
MTKAAIYIRVSTQDQVENYSIEVQRERIRAYCKAKGWDIYDEYIDGGYSGSNLDRPDIKRLLNDLKKIDVVVVYKLDRLSRSQRDTLELIEEHFLKNNVDFVSITETLDTSTPFGKAMIGILSVFAQLERETIAERMRMGHIKRAENGLRGNGGDYDPSGYTRVDGHLILNPNEAKHIKRAFDLYEQYHSITRVQEVLKEEGYTIWRFRRYRDVLSNTLYIGQITFAGKTYKGQHEPIVSLEQFKRVQALLKRHKGHNAHKAKQSLLSGLITCSCCGEKFVAYSTGKSKDIESKRYYYYICRAKRFPSEYDEKCLNKTWSRKKLEEVIFDELKNLTVKKSASQKKEKKINYEKLIKDIDKKMERLLDLFTNTTNISRQLLETKMDKLNLEKEHLILKQQSYEQEFSISKDMITTINESLETMDFKDKQIIINTFIQEIHIDHDVVDIIWR

SEQ ID NO: 349 - protein, 468 aa, Artificial Sequence
  Synthetic
MEINKLKAALYVRVSTTEQANEGYSISAQTEKLTNYAKAKDYQIVKTYTDPGISGAKLDRPALQNMITDIEKGMIDIVLVYKLDRLSRSQKNTLYLIEDVFLKNKVDFISMNESFDTSTSFGRAMIGILSVFAQLERDAITERTRMGKIERAKEGKWQGGGNFAPFGYRYENDILKVNEFEKIIVQEMFDLYLEGYGTNKIAEILGTKYPGKVKSPNLVKGILRNKIYIGKINFAGEIYDGLHETFIDKKIFQNVQEIYGKRANKTYKGDYNQKGLLLGKIYCAKCGAKYYRQVTGSVKYRYVKYACYSQNRSLSSKTMVKDRNCVNKRYNAEELEQSTIDKINKLTVAELTSTTNLKLLDNRKTIEKEIKNLESQINKLIDLFQLGNISTELLSSRIDNLNIQKNNLEIELSKLKKVKTKKEIESKLQTLKDFDWDTETTINKIKMIDEFIDKITINDDEVLIHWRL

SEQ ID NO: 350 - protein, 411 aa, Artificial Sequence
  Synthetic
MRTVRRIQPIKSPCSPKLKVAAYARVSDSRLHHSLSTQISYYNRLIQAHPDWELVGIYYDEGISGKEQSNRQGFQNIIKDCDNGKIDRIITKSIARFGRNTVELLTTVRQLRLKNIGVTFEKENIDSLSSEGELMLTLLASVAQEESQNMSENIRWRVQKKFENGMPHTPQDMYGYRWDGEQYQIEPNEAKVIRNVFKWYLDGDSVQQIVDKLNQEHVLTRLGNPFTVASIREFFKQEAYFGRLVLQKTYREAFSRNPKRNKGQRTKYIIENAHEPIVTKEYFELVLHEKERRYQLMHQESHLNKGIFRDKIFCSDCGCLMIVKVDSKHVKKTVRYYCRTRNRFGASSCPCRTLGEKRLLASFKSKLGSVPDKEWVENNIKRIEYDFGHRIIKVTPVKGRKYPIEIRGGRY

SEQ ID NO: 351 - protein, 520 aa, Artificial Sequence
  Synthetic
MKKVITIEATPSIIRSSSDDFSLKKRRVAGYARVSTDHEDQATSYESQMRYYSEYINGRDDWEFVKMYSDEGISGTNTKLRTGFKSMVEDALNGKIDLIITKSVSRFARNTVDSLTTVRQLKEVGVEIYFEKENIWTLDSKGELLITIMSSLAQEESRSISENVTWGLRKQFAEGKVHFPYTNVLGFKAGEDGAIVVDQDEAKTVRYIFQQALIGKSPYHIARDLTEQGIPSPSGKSQWNATTIKRMLRNEKYKGDALLQKTYTIDFLTKKKNINRGELPQYYVENNHEAIVDRETFDAVQQVLDNKGRKSSTTIFSSKLVCGDCGHFFGSKVWHSTSKYRRVIYRCNEKYNGSSKCSTPHVTEEEVKQWFVSAVNQVIDNRLEVIDNLSVLLSIGSFEVIDEQIKNLETDAEVVSQLVANLVSENAIISQDQDKYLKKYNQLTSKYEGIVREIESLELQRMEKSKRNKELQVFMEFLNNQEGLLTDFDELLWETMVESITINLEKKIFFKFKNGAVATI

SEQ ID NO: 352 - protein, 471 aa, Artificial Sequence
  Synthetic
MRKVAIYSRVSTINQAEEGYSIQGQIEALTKYCEAMEWKIYKNYSDAGFSGGKLERPAITELIEDGKNNKFDTILVYKLDRLSRNVKDTLYLVKDVFTANNIHFVSLKENIDTSSAMGNLFLTLLSAIAEFEREQIKERMQFGVMNRAKSGKTTAWKTPPYGYRYNKDEKTLSVNELEAANVRQMFDMIISGCSIMSITNYARDNFVGNTWTHVKVKRILENETYKGLVKYREQTFSGDHQAIIDEKTYNKAQIALAHRTDTKTNTRPFQGKYMLSHIAKCGYCGAPLKVCTGRAKNDGTRRQTYVCVNKTESLARRSVNNYNNQKICNTGRYEKKHIEKYVIDVLYKLQHDKEYLKKIKKDDNIIDITPLKKEIEIIDKKINRLNDLYINDLIDLPKLKKDIGELNHLKDDYNKAIKLNYLDKKNEDSLGMLMDNLDIRKSSYDVQSRIVKQLIDRVEVTMDNIDIIFKF

SEQ ID NO: 353 - protein, 471 aa, Artificial Sequence
  Synthetic
MRKVAIYSRVSTINQAEEGYSIQGQIEALTKYCEAMEWKIYKNYSDAGFSGGKLERPAITELIEDGKNNKFDTILVYKLDRLSRNVKDTLYLVKDVFTANNIHFVSLKENIDTSSAMGNLFLTLLSAIAEFEREQIKERMQFGVMNRAKSGKTTAWKTPPYGYRYNKDEKTLSVNELEAANVRQMFDMIISGCSIMSITNYARDNFVGNTWTHVKVKRILENETYKGLVKYREQTFSGDHQAIIDEKTYNKAQIALAHRTDTKTNTRPFQGKYLLSHIAKCGYCGAPLKVCTGRAKNDGTRRQTYVCVNKTESLARRSVNNYNNQKICNTGRYEKKHIEKYVIDVLYKLQHDKEYLKKIKKDDNIIDITPLKKEIEIIDKKINRLNDLYINDLIDLPKLKKDIEELNHLKDDYNKAIKLNYLDKKNEDSLGMLMDNIDIRKSSYDVQSRIVKQLIDRVEVTMDNIDIIFKF

SEQ ID NO: 354 - protein, 471 aa, Artificial Sequence
  Synthetic
MRKVAIYSRVSTINQAEEGYSIQGQIEALTKYCEAMEWKIYKNYSDAGFSGGKLERPAITELIEDGKNNKFDTILVYKLDRLSRNVKDTLYLVKDVFTANNIHFVSLKENIDTSSAMGNLFLTLLSAIAEFEREQIKERMQFGVMNRAKSGKTTAWKTPPYGYRYNKDEKTLSVNELEAANVRQMFDMIISGCSIMSITNYARDNFIGNTWTHVKVKRILENETYKGLVKYREQTFSGDHQAIIDEKTYNKAQIALAHRTDTKTNTRPFQGKYMLSHIAKCGYCGAPLKVCTGRAKNDGTRRQTYVCVNKTESLARRSVNNYNNQKICNTGRYEKKHIEKYVIDVLYKLQHDKEYLKKIKKDDNIIDITPLKKEIEIIDKKINRLNDLYINDLIDLPKLKKDIEELNHLKDDYNKAIKLNYLDKKNEDSLGMLMDNLDIRKSSYDVQSRIVKQLIDRVEVTMDNIDIIFKF

SEQ ID NO: 355 - protein, 471 aa, Artificial Sequence
  Synthetic
MRKVAIYSRVSTINQAEEGYSIQGQIEALTKYCEAMEWKIYKNYSDAGFSGGKLERPAITELIEDGKNNKFDTILVYKLDRLSRNVKDTLYLVKDVFTANNIHFVSLKENIDTSSAMGNLFLTLLSAIAEFEREQIKERMQFGVMNRAKSGKTTAWKTPPYGYRYNKDEKTLSVNELEAANVRQMFDMIISGCSIMSITNYARDNFVGNTWTHVKVKRILENETYKGLVKYREQTFSGDHQAIIDEKTYNKAQIALAHRTDTKTNTRPFQGKYMLSHIAKCGYCGAPLKVCTGRAKNDGTRRQTYVCVNKTESLARRSVNNYNNQKICNTGRYEKKHIEKYVIDVLYKLQHDKEYLKKIKKDDNIIDITPLKKEIEIIDKKINRLNDLYINDLIDLPKLKKDIEELKHLKDDYNKAIKLNYLDKKNEDSLGMLMDNIDIRKSSYDVQSRIVKQLIDRVEVTMDNIDIIFKF

SEQ ID NO: 356 - protein, 452 aa, Artificial Sequence
  Synthetic
MLRVALYIRVSTEEQALNGDSIRTQIEALEQYSKENDFNIVGKYIDEGCSATNLKRPNLQRLLRDVEKDKVDLVLMTKIDRLSRGVKNYYKIMETLEKHKCDWKTILENYDSSTAAGRLHINIMLSVAENEAAQTSERIKFVFQDKLRRKEVISGTIPIGYKIENKHLVIDKEKKYIVKAIFDEYEKSGSVRTLIETINNLHGELYSYNKIKNILRNELYIGIYNKRGFYVEDYCEPIISKKQFKQIQRILEKNKKTTPNKNIHYHIFSGLLKCKECGYTLKGNSSNVGEKLYLSYRCSTFYLNKNCVHNVTHNEKHIENYLLTNLKPQLHKHMVKLEAQNEKIRRNKKSNKKDEKKKIMKKLDKIKDLYLEDLIDKETYRKDYEKLQSQLDNITEEQESQIIDTSHIKKFLDIDINEMYSDLSRVERRRFWLSIIDYIEIDNNKNITINFI

SEQ ID NO: 357 - protein, 421 aa, Artificial Sequence
  Synthetic
MQQLIKDADTGLYDAVLVYKLDRLSRSQKDTLYLIEDVFQKNNIHFISLSENFDTSTAFGKAMIGILSVFAQLEREQIKERMSMGRVGRAKSGKIMEFNNPAFGYEVDGDNYKVDPLRAEIVKRIYKMYLSGTSINKIKETLNLEGHIGNKKNWSDTRIRYILSNPTYLGKIRYDGKTYDGKFSPIIDEETFNKTQNELKERQTATYKRFNMKLRPFQSKYMLSGLLRCGYCGATLFVNSYVYNGKRKLRYNCPSTYKSKQKTRTYKIMDPNCPFKLVYAKDLEPAVINEIKNLALNPQSIQKPVKKKPDIDVEAIQKELAKVRKQQQRLIDLYVISDDVNIDNISKKSADLKLQEETLKKQLAPLEEPNDDDKIVAFNEILAQIKDIDSLDYDKQKFIVKKLIKKIDVWNDNKIKIHWNI

SEQ ID NO: 358 - protein, 474 aa, Artificial Sequence
  Synthetic
MAVGIYIRVSTQEQASEGHSIESQKKKLASYCEIQGWDDYRFYIEEGISGKNTNRPKLKLLMEHIEKGKINILLVYRLDRLTRSVIDLHKLLNFLQEHGCAFKSATETYDTTTANGRMSMGIVSLLAQWETENMSERIKLNLEHKVLVEGERVGAIPYGFDLSDDEKLVKNEKSAILLDMVERVENGWSVNRIVNYLNLTNNDRNWSPNGVLRLLRNPALYGATRWNDKIAENTHEGIISKERFNRLQQILADRSIHHRRDVKGTYIFQGVLRCPVCDQTLSVNRFIKKRKDGTEYCGVLYRCQPCIKQNKYNLAIGEARFLKALNEYMSTVEFQTVEDEVIPKKSEREMLESQLQQIARKREKYQKAWASDLMSDDEFEKLMVETRETYDECKQKLESCEDPIKIDETYLKEIVYMFHQTFNDLESEKQKEFISKFIRTIRYTVKEQQPIRPDKSKTGKGKQKVIITEVEFYQ

SEQ ID NO: 359 - protein, 504 aa, Artificial Sequence
  Synthetic
MRICMYLRKSRADEELEKTLGEGETLSKHRKALLKFAKEKNLNIVEIKEEIVSGESLFFRPKMLELLKEIENKQYSGVLVMDMQRLGRGNMQDQGIILETFKKSNTKIITPMKTYDLSNDFDEEYSEFEAFMSRKELKMINRRMQGGRVRSVEDGNYIATNAPYGYDIHWINKARTLKPNQKESEIVKLIFKLYIEGNGAGTIAKHLNSLGYKTKFGNSFNNSSIIFILKNPVYIGKITWKKKDIRKSKDPNKVKDTRTRDKSEWIIVDGKHDPIIDQITWKQAQEILNNRYHVPYKLVNGPANPLAGLIICTTCKSKMVMRKLRGTDRILCKNNKCNNISNRFDAVEKSVVESLENYLKAYKVNLPELNKTSNLKLYEQQISTLKKELKILNEQKLKLFDFLERGIYDEDTFLKRSKNLDERIEITNESLSNLNQIIAKENKAIKKEDIIKFEKVLDSYKSTADIRLKNELMKTLIFKIEYTKNKKGNDFKIKVFPKLKPLNI

SEQ ID NO: 360 - protein, 545 aa, Artificial Sequence
  Synthetic
MIAAIYSRKSKFTGKGESVENQIEMCKEYLKRNFNNIDDIEIYEDEGFSGKDTNRPKFKKMIKAAKNKKFNILICYRLDRISRNVADFSNTIEELQKYNIDFISIKEQFDTSTPMGRAMMNIAAVFAQLERETIAERIKDNMVELAKTGRWLGGTSPLGYKSEPIEYSNEDGKSKKMYKLTEVENEMNIVKLIYKLYLEKRGFSSVATYLCKNKYKGKNGGEFSRETARQIVINPVYCISDKTIFKWFKSKGATTYGTPDGIHGLMVYNKREGGKKDKPINEWIIAVGKHRGVISSDIWLKCQNLIQQNNAKSSPRSGTGEKFLLSGMVVCKECGSGMSSWSHFNKKTNFMERYYRCNLRNRASNRCSTKMLNAYKAEEYVANYLKELDINAIKKMYHSNKKNIIDYDAKYEVNKLNKSIEENKKIIQGIIKKIALFDDLDILGMLKNELERLKKENDEMKIKLKELKSILELEDEEEIFLSTMEENISNFKKFYDFVNITQKRILIKGLVESIVWDTGGEEKILEINLIGSNTKLPSGKVKRRE

SEQ ID NO: 361 - protein, 458 aa, Artificial Sequence
  Synthetic
MKVAIYTRVSTLEQKEKGHSIEEQERKLRAYSDINDWTIQGVYVDAGYSGAKTDRPELNRLKENLSKIDLVLVYKLDRLTRNVKDLLDLLEIFERENVSFRSATEVYDTSTAMGRLFVTLVGAMAEWERETIRERAMMGKQAAIRKGMILTPPPFYYDRVDNKYIPNKYKDVVVWAYEEVKKGNSAKGIARKLNASDIPPPNGIQWEDRTITRALRSPLSKGHYFWGDIFIENSHEPIITDEMYNEIKERLNERVNAKTITHTSVFRGKLICPNCNGRLCLNTSYRKLKRGDVIHKNYYCNNCKVNKSGAFSFTEKEALKVFYDYLSKLDLSKYKAKEKEDKKIVTIDINKVMEQRKRYHKLYANGMMQEEELFELIKETDEKISEYEKQKERVPKKRLDVSKIKNFKNILLDSWNAFTLEDKEDFIKMAIKSIEIEYIHVKRGKTKHSIKIKNIDFY

SEQ ID NO: 362 - protein, 515 aa, Artificial Sequence
  Synthetic
MKTAIYLRKSRADLEAEARGEGETLAKHRSTLLKIAKEMNLNVLSVREEIVSGESLVKRPEMLALLEEIEDNKYDAVLCMDMDRLGRGGMKEQGIILETFKRSNTKIMTPRKTYDLNDEWDEEYSEFEAFMARKELKIITRRMQRGRIASVEAGNYLGTHAPFGYDIHRLNKRERTLTINSEEASVVRMIFDWYANEDMGASAIRNKLNDLGYKSKLGNDWNPYSILDILKNNIYIGKVTWQKRKEVKRPDAVKRSCARQDKSDWIIADGKHEPIIPESLFEQAQEKLNSRYHVPYNTNGIKNPLAGIIKCSKCGYSMVQRYPKNRKETMDCKHRGCENKSSYTELIEKRLLEALKEWYINYKADFEAHKQGDKLKETQVIQMNEAALRKLEKELVDVQKQKNNLHDLLERGVYTVDMFLERSQVISDRINEITSTMENLKKEIKTEIKKEKVKKDTIPQVEHVLDLYFKTDDPKKKNSLLKSVLEKAVYKKEKWQRLDDFELVLYPKLPQDGDI

SEQ ID NO: 363 - protein, 447 aa, Artificial Sequence
  Synthetic
MLRCAIYIRVSTEEQAMHGLSMDAQKADLTDYAKKHNYEIIDYYVDSGKTARKRLSKRKDLQRMIEDVKLNKIDIIIFTKLDRWFRNVRDYYKIQEVLEDHNVDWKTIFENYDTSTANGRLHINIMLSVAQDEADRTSERIKRVFENKLKNNEPTSGSLPIGYKIKEKSIIIDEEKAPIAKDVFDFYYYHQSQTKVFKEILNKYNLSLCEKTIRRMLENKLYIGIYREHENFCPPLIDKNKFDEVQLILKRRNIKYIPTKRIFLFTSLLICKECRHKMIGNAQIRNTKAGKIEYILYRCNQSYARHTCNHRKVIYENKIETYLLNNIESELKKFIYDYELEDIPKVKNKVNKTNIKRKLEKLKELYINDLIDIDMYKEDYKKYTEILNTKEEKIEQRNLQPLKDFLNSDFKSLYSSISREEKRLLWRGIISEIQIDCNNDITIIPHP

SEQ ID NO: 364 - protein, 516 aa, Artificial Sequence
  Synthetic
MYRPESLDVCIYLRKSRKDVEEERRAIEEGSSYNALERHRKRLFAIAKAENHNIIDIFEEVASGESIQERPQMQQLLRKLEGNEIDGVLVIDLDRLGRGDMLDAGMIDRAFRYSSTKIITPTDVYDPDDESWELVFGIKSLISRQELKSITKRLQNGRIDSVKEGKHIGKKPPYGYLKDENLRLYPDPEKAWIVKKIFELMCDGKGRQMIAAELDRLGIDPPVTKRGAWDSSTITSIIKNEVYTGVIVWGKFKHKKRNGKYTRHKNPQEKWIMYENAHEPIISKELFDAANEAHSSRHKPAVITSKKLTNPLAGILKCKLCGYTMLIQTRKDRPHNYLRCNNPACKGKQKQSVFNLVEEKLLYSLQQIVDEYQAQKVEEVEIDDSKLISFKEKAIISKEKELKELQAQKGNLHDLLEQGIYTVEIFLERQKNLVERITSIENDIEVLQKEIETEQIKEHNKTEFIPALKTVIESYHKTTNIELKNQLLKTILSTVTYYRHPDWKTNEFEIQVYFKI

SEQ ID NO: 365 - protein, 475 aa, Artificial Sequence
  Synthetic
MITTNKVAIYVRVSTTNQVEEGYSIDEQKDKLEAYCKIKDWKIYDVYVDGGFSGANTQRPELERLISDVKRKKVDIVLVYKLDRLSRSQKDTLFLIEDVFAKNDVAFISLQENFDTSTPFGKASIGMLSVFAQLEREQIKERMMLGKEGRAKNGKSMSWTTIAFGYDYSKETGVLSVNPTQALIVNRIFTEYLNGKPVVKIIRDLNAEGHVGRKRPWGETITKYLLKNETYLGKVKYKDKVYEGQHEPIITQELFDLVQLEVERRQISAYEKYNNPRPFRAKYMLSGLMKCGYCGASLGLRYTRKDKNGISHHKYQCRNRHSKDLEKRCESGWYSKEELERGVIKELERIKFDPKYKNETLAKKEETIKVEEIKKQLERINNQVSKLTELYLDEIITRKELDEKNDKIKTERQFLEEQLENQKSNVLSIRKRKLTRLLKDFDVEKLSYEDASKIVKNIIKEIIVTKDGMSITLDF

SEQ ID NO: 366 - protein, 477 aa, Artificial Sequence
  Synthetic
MITTRKVAIYVRVSTTNQAEEGYSIQGQIDSLIKYCEAMGWIIYEEYTDAGFSGGKIDRPAMSKLITDAKHKRFDTILVYKLDRLSRSVRDTLYLVKDVFNQNNIHFVSLQENIDTSSAMGNLFLTLLSAIAEFEREQITERMTMGKIGRAKSGKTMAWTYTPFGYDYNKEKGELILDPAKAPIVKMIYTDYLKGMSIQKIVDKLNKMDYNGKDCTWFPHGVKHLLDNPVYYGMTRYNNKLFPGNHQPIITKELFDKTQRERQRRRLGIEENHYTIPFQAKYMLSKFLRCRQCGSRMGLELGRPRKKEGKRSKKYYCLNSRPKRTASCDTPLYDAETLEDYVLHEIAKIQKDPSIASRQKHIEDHELKYKRERIEANINKTVNQLSKLNNLYLNDLITLEDLKTQTNTLIAKKRLLENELDKTCDNDDELDRQETIADFLALPDVWTMDYEGQKYAVELLVQRVKVDRDNIDIHWTF

SEQ ID NO: 367 - protein, 540 aa, Artificial Sequence
  Synthetic
MKAIAIYARKSLFTGKGDSIGAQVDTCKRFIDYKFANEDYEIRTFKDEGWSGKTTDRPDFTNMVNLIKSKKIDYVITYKLDRIGRTARDLHNFLYELDNLGIVYLSATEPYDTTTSAGRFMISILAAMAQMERERLAERVKSGMIQIAKKGRWLGGQCPLGFDSKREIYIDDMGKERQMMRLTPNKEEIKIVKLIYDKYLEMGSMSQVRKYCLENSIRGKNGGDFSTNTLKQLLTSPIYVKSSDNIFKYLESQNINVFGTPNGNGMLTFNKTKEIRIERDKSEWIAAVGKHKGIIDDNKWLQIQQQLQQQSEKQIKSSGRQGTTSTGLLSGIIKCSKCGNNLLIKTGHKSKKNPGTTYSYYVCGKKDNSYGHKCDNKNVRTDEADSAVITQLKLYNKELLIKNLKEALIQNEKTDTDNIEILESKLKEKEKAVSNLVKKLSLIDDESISNIILNEVTNINKEINDIKLQLSNETLKINEVTKATLDTEIYIKILENFNKKIDDITDPIEKMNLLKSALESVEWNGDSGEFKINLIGSKKK

SEQ ID NO: 368 - protein, 462 aa, Artificial Sequence; identical to SEQ ID NO: 100
  Synthetic

SEQ ID NO: 369 - protein, 507 aa, Artificial Sequence
  Synthetic
METMPQPLRALVGARVSVVQGPQKVSQQAQLETARKWAEAQGHEIVGTFEDLGVSASVRPDERPDLGKWLTDEGASKWDVIVWSKMDRAFRSTKHCVDFAQWAEERQKVVMFAEDNLRLDYRPGAAKGIDAMMAELFVYLGSFFAQLELNRFKSRAQDSHRVLRQTDRWASGLPPLGYKTVPHPSGKGFGLDTDEDTKAVLYDMAGKLLDGWSLIGIAKDLNDRGVLGSRSRARLAKGKPIDQAPWNVSTVKDALTNLKTQGIKMTGKGKHAKPVLDDKGEQIVLAPPTFDWDTWKQIQDAVALREQAPRSRVHTKNPMLGIGICGKCGATLAQQHSRKKSDKSVVYRYYRCSRTPVNCDGVFIVADEADTLLEEAFLYEWADQPVTRRVFVPGEDHTYELEQINETIARLRRESDAGLIVSDEDERIYLERMRSLITRRTKLEAMPRRSAGWVEETTGQTYGEAWETEDHQQLLKDAKVKFILYSNKPRNIEVVVPQDRVAVDLAI

SEQ ID NO: 370 - protein, 473 aa, Artificial Sequence
  Synthetic
MRNKVAIYVRVSTASQADEGYSIDEQKSKLEAYCEIKDWKIYDTYIDGGFSGANTQRPELERLISDAKRKKIDIVLVYKLDRLSRSQKDTLFLIEDVFAKNDVAFISLQENFDTSTPFGKASIGMLSVFAQLEREQIKERMMLGKEGRAKNGKSMSWTTIPFGYDYSKETGILSVNPTQALIVKRIFTEYLNGKSVVKIIRDLNAEGHVGRKRPWGETITKYLLKNETYLGKSKYKGKVFEGQHDAIISQELFDLVQLEVEKRQISAFEKYNNPRPFRAKYMLSGLMKCGYCGASLGLYVAPKNKNGVSKYKYQCRHRYHKDKAIRCNSGWYSKDELEKRVIKELERLKFDPKYKKETLAKKDETIKVEDIKKQLERINKQVSKLTELYLDEVITRKDLDEKNAKIKTERQYLEEQLENQKSNVMSIRKRKLSRLLKDFDIEKLSYEEASKIVKSVIKEIVVTKDDMTITLDF

SEQ ID NO: 371 - protein, 460 aa, Artificial Sequence; identical to SEQ ID NO: 98
  Synthetic

SEQ ID NO: 372 - protein, 481 aa, Artificial Sequence; identical to SEQ ID NO: 53
  Synthetic

SEQ ID NO: 373 - protein, 465 aa, Artificial Sequence
  Synthetic
MKLRAAIYVRVSTMEQAEEGYSISAQTEKLKSYANAKDYQVVKVFTDPGYSGAKLERPGLQNMIKSIESKEIDVVLVYKLDRLSRSQKNTLFLIEDVFLKNHVQFTSMQESFDTSTSFGRAMIGILSVFAQLERDAITERMQMGAKERAKAGMWRGGPQSRLPFGYRYIDGVLLVDDYEAMIVKYMYTEFIKGTPLTKIQSKVAAKFPVKETLIYPSIMKNILQNNIYIGKIKYAGETYEGLHEHILDTETYDKAQQLWEHRNTNKKKYFESKYLLSGILYCGHCGGKMASTGAGLLKSGERVTDYICYSKKGTPSHMVVDRNCPSKRHRVNRLDPKIVELLKTITFEEMQKDNSFTDNTTTIKSEIESLDTKISKLLDLYQDGLVPIDVLNDRISKLNDDKELLQETLISQKKQIHPEEIAKNIQTAKDFDWANSDSAAKRAMVRALINKVELTNEDMKIEWNI

SEQ ID NO: 374 - protein, 463 aa, Artificial Sequence
  Synthetic
MKVATYVRVSTDEQAKEGFSIPAQRERLRAFCESQGWEIVEEYIEEGWSAKDLDRPQMQRLLKDIKKGNIDIVLVYRLDRLTRSVLDLYLLLQTFEKYNVAFRSATEVYDTSTAMGRLFITLVAALAQWERENLAERVKFGIEQMIDEGKKPGGHSPYGYKFDKDFNCTIIEDEANTVRMIYRMYCDGYGYHSIAKRLNELGIKPRIAKEWNHNSVRDILTNDIYIGTYRWGNKVVLNNHPPIISETLFRKVQKEKEKRRVDRTRVGKFLLTGLLYCGNCNGHKMQGTFDKREQKTYYRCLKCNRITNEKNILEPLLDEIQLLITSKEYFMSKFSDQYDQKEEVDVSALKKELEKIKRQKEKWYDLYMDDRNPIPKEDLFAKINELNKKEEEIYNKLNEVEPEDKEPVEEKYNRLSKMIDFKQQFEQANDFTKKELLFSIFEKIVIYREKGKLKKITLDYTLK

SEQ ID NO: 375 - protein, 513 aa, Artificial Sequence
  Synthetic
MKYLALHENSRIAVYSRKSREDRDSEDTLAKHRNELEYLIKRENFKNVQWFEKVVSGETIDERPMFSLLLPRIENGEFDAVCAVAMDRLSRGSQIDSGRILEAFKQSGTLFITPKKTYDLSIEGDEMLSEFESIIARSEYRAIKRRTINGKKNATREGRLHSGSVPYGYKWDKNLKAAVVVEEKKKIYRMMIKWFLEEEYSCTVIAEMLNELKVPSPSGRSIWYGEVVSEILSNDFHRGYVWFGKYKKSKSNNSIVQNKNLDEVLIAKGHHETMKTDEEHALILNRIEKLRTYKVAGRRLNMNTHRLSGIVRCPYCHKAQAIEQPKGRRKHVRKCLRKSAERTKECEETKGIHEEVLFQSIMKEIKKYNESLFSPTEQDVNDDSYTAQLIGLREKAVKKAKGRIERIKEMYLDGDISKTEYKEKLKISQETLQKAENELAELIASTEFQNALSAETKKEKWSHHKVQEMIESTDGMSNSEINLILKMLISHVTYTVEDLGDGTKNLNIKVYYN

SEQ ID NO: 376 - protein, 592 aa, Artificial Sequence
  Synthetic
MKITLLYYIKKFNIYCNRYLSQQINISVDIIGFYQFKNVTNSVTDVLKRGDNLDRICIYLRKSRADEELEKTIGVGETLSKHRKALLKFAKEKKLNIMEIKEEIVSADSIFFRPKMIELLKEVENNQYTGVLVMDIQRLGRGDTEDQGIIARIFKESHTKIITPMKTYDLDDDLDEDYFEFESFMGRKEYKMIKKRMQGGRVRSVEDGNYIATNPPFGYDIHWINKSRTLKFNSKESEIVKLIFKLYTEGNGAGTISNYLNSLGYKTKFGNNFSNSSIIFILKNPVYIGKITWKKKDIRKSKDPHKVKDTRTRDKSEWIIADGKHEPIIDEKIWNKAQEILNNKYHIPYKIANGPANPLAGVVICSKCNSKMVMRKYGKKLPHLICNNKECNNKSARFDYIEKAVLEGLDEYLKNYKVNVKANNKTSDIEPYEQQSNALNKELILLNEQKLKLFDFLEREIYTEEIFLERSKNLDERINTTTLAINKIKKILDNEKKKNNKNDIVKFEKILEGYKKTNDIQKKNELMKSLVFKIEYKKEQHQRNDGLLYIYFLSFCVRCISYLTQFISFFVYPYRILEIYLTFSFFIISYEH

SEQ ID NO: 377 - protein, 460 aa, Artificial Sequence
  Synthetic
MKVAIYTRVSSAEQANEGYSIHEQKKKLISYCEIHDWNEYKVFTDAGISGGSMKRPALQKLMKHLSSFDLVLVYKLDRLTRNVRDLLDMLEEFEQYNVSFKSATEVFDTTSAIGKLFITMVGAMAEWERETIRERSLFGSRAAVREGNYIREAPFCYDNIEGKLHPNEYAKVIDLIVSMFKKGISANEIARRLNSSKVHVPNKKSWNRNSLIRLMRSPVLRGHTKYGDMLIENTHEPVLSEHDYNAINNAISSKTHKSKVKHHAIFRGALVCPQCNRRLHLYAGTVKDRKGYKYDVRRYKCETCSKNKDVKNVSFNESEVENKFVNLLKSYELNKFHIRKVEPVKKIEYDIDKINKQKINYTRSWSLGYIEDDEYFELMEEINATKKMIEEQTTENKQSVSKEQIQSINNFILKGWEELTIKDKEELILSTVDKIEFNFIPKDKKHKTNTLDINNIHFKF

SEQ ID NO: 378 - protein, 485 aa, Artificial Sequence
  Synthetic
MSKKVAIYTRVSTTNQAEEGYSIDEQIDKLKMYCEAMDWKVSEIYTDAGFTGSKLTRPAMEKMITDIGLKKFDTVIVYKLDRLSRSVRDTLYLVKDVFTKNEIDFISLSESIDTSSAMGSLFLTILSAINEFERENIKERMTMGKIGRAKSGKSMMWAKTAFGYSHNQETGILEINPLEASIVEQIFNEYLKGTSITKLRDKLNEDGHIAKELPWSYRTIRQTLDNPVYCGYIKYKNNTFEGLHKPIISHETYLSVQKELEARQQQTYEKNNNPRPFQAKYLLSGIARCGYCGAPLRIVLGHRRKDGSRTMKYQCVNRFPRKTKGVTTYNDNKKCDSGAYDMQWIEDIVLKTLNGFQKSDKKLRKILNIKEESKVDTSGFQKQLKSINNKIQKNSDLYLNDFITMDDLKKRTEMLQGEKKLIQARINEVDKPSTSEIFDLVKSELGETTISKISYEDKKKIVNNLISKVDVTADNIDIIFKFQLA

SEQ ID NO: 379 - protein, 411 aa, Artificial Sequence
  Synthetic
MRTVRRIQPIKSPCKPRFKVAAYARVSDSRLHHSLSTQISYYNRLIQAHPDWELVGIYYDEGISGKEQSNRQGFLNLIKDCEDGKIDRIITKSIARFGRNTVELLTTVRQLRLKNIGVTFEKENIDSLSSEGELMLTLLASVAQEESQNLSENIRWRIQKKFEKGIPHTPQDMYGYRWDGEQYQIEPNEAKVIRKVFKWYLDGDSVQQIVDKLNQEQVLTRLGNPFTVASIREFFKQEAYFGRLVLQKTYREAFSRNPKRNKGQRNKYIIENAHEPIVTKEYFDLVLHEKERRNQLMHQESHLNKGIFRDKISCSECGCLMIVKVDSKQVNKTVRYYCRTRNRFGASSCSCRTLGEKRLLASFKSKLGIVPDKEWVENNIKHIEYDFGYRILRVTPVKGRKYLIEIREGRY

SEQ ID NO: 380 - protein, 470 aa, Artificial Sequence; identical to SEQ ID NO: 91
  Synthetic

SEQ ID NO: 381 - protein, 547 aa, Artificial Sequence
  Synthetic
MKRDLPSTFRGSRTPGEPWLGYIRVSTWREEKISPELQQSAIESWAARTGRRIVDWIVDLDATGRNFKRKIMGGIQRVEGREAVGIAVWKFSRFGRNDLGIAINLARLEQAGGDLASATEEVDARTAVGRFNRAILFDLAVFESDRAGEQWKETHAHRRALKLPATGRQRFGYVWHPRRVPDLTAPGGFRLQEERYERHPEFAPVAAELYERKLAGQGFSQLAYWLNDELLIPTTRGNRWGTNTVQRYLDSGFAAGLLRVHDPECRCKLGQDHFSACKENRWLWLPGAQPALIVPEQWKEYGAHREQTRKTPPRARRASYPTSGIMRHGHCRGTAVARSGRDGKGGFVPGHVFVCFNRRNKGKSACEPGLYVRRDEVEAEVLKWLADTVADDIDNAPALPAQRTAPGTAPDPRARLVEERTRTEAELAKIEGALDRLVTDYALDPDKYPADTFGRVRDQLLGKKGDIIKHLKSLSEVEVAPTREEFRPLIVGLLQEWDILHTTEKNAILRRLLRRLVIHNRKSDQGAQWSVVRSFEFHPVWEPDPWS

SEQ ID NO: 382 - protein, 547 aa, Artificial Sequence; identical to SEQ ID NO: 381
  Synthetic

SEQ ID NO: 383 - protein, 626 aa, Artificial Sequence
  Synthetic
MSVKVEGMVILAGGYDRQSAERENSSTASPATQRAANRGKAEALAKEYARDGVEVKWLGHFSEAPGTSAFTGVDRPEFNRILDMCRNREMNMIIVHYISRLSREEPLDIIPVVTELLRLGVTIVSVNEGTFRPGEMMDLIHLIMRLQASHDESKNKSVAVSNAKELAKRLGGHTGSTPYGFDTVEEMVPNPEDGGKLVAIRRLVPSAHTWEGAHGSEGAVIRWAWQEIKTHRDTPFKGGGAGSFHPGSLNGLCERLYRDKVPTRGTLVGKKRAGSDWDPGVLKRVLSDPRIAGYQADIAYKVRADGSRGGFSHYKIRRDPVTMEPLTLPGFEPYIPPAEWWELQEWLQGRGRGKGQYRGQSLLSAMDVLYCYGSGQLDPETGYSNGSTMAGNVREGDQAHKSSYACKCPRRVHDGSSCSITMHNLDPYIVGAIFARITAFDPADPDDLEGDTAALMYEAARRWGATHERPELKGQRSELMAQRADAVKALEELYEDKRNGGYRSAMGRRAFLEEEAALTLRMEGAEERLRQLDAADSPVLPIGEWLGDRGSDPTGPGSWWALAPLEDRRAFVRLFVDRIEVIKLPKGVQRPGRVPPIADRVRIHWAKPKVEEETEPETLNGFTAAA

SEQ ID NO: 384 - protein, 525 aa, Artificial Sequence
  Synthetic
MSARDYDIEAEWTPADLALLKELEEAEALLPADAPRALLSVRLSVFTDDTTSPVRQELDLRQLAREKGYRVVGLASDLNVSATKVPPWKRKSLGDWLNNRAPEFDALLFWKIDRFIRNLNDLNVMIRWSETYSKNLISKNDPIDLTTTMGKMMVSLLGGVAEIEAANTKTRVESLWDYTKTQGEWHVGKPPFGYKTGRDAAGKVVLVEDPPAVETLHTARELVMSGMSTTAAAKELKERGLISSTTATLTRRLRNPGILGLRVEEDKDGGIRRSKLILGRDGQPIRIADPIFTEEQFEELQAVLDKRGKRQPHRQPGGATSFLGVLKCAECGTNMINHFTRNRHGDYAYLRCQGCKSGGCGAPNPQEVYDRLVEQVLAVLGDFPVEMREYARGEEKRKELKRLEESIAYYMKELEPGGRFTKTRFTQDQAEGTLDKLIAELEAIDPESAKDRWVYVAGGKTFREHWEEGGIDAMSADLIRAGIRCQVTRTKVPKVRAPQVHLKLMIPKDVRTRLVIRPDDFGQTF

SEQ ID NO: 385 - protein, 525 aa, Artificial Sequence
  Synthetic
MSARDYDIEAEWTPADLALLKELEEAEALLPADAPRALLSVRLSVFTDDTTSPVRQELDLRQLAREKGHRVVGLASDLNVSATKVPPWKRKSLGDWLNNRAPEFDALLFWKIDRFIRNLNDLNVMIRWSETYSKNLISKNDPIDLTTTMGKMMVSLLGGVAEIEAANTKTRVESLWDYTKTQGEWHVGKPPFGYRTGRDDSGKVVLVEDPLAVETLHTARELVMTGMSTTAAAKELKERGLISSTTATLTRRLRNPGILGLRVEEDKDGGIRRSKLILGRDGQPIRIADPIFTEEQFEELQAVLDKRGKRQPHRQPGGATSFLGVLKCAECGTNMINHFTRNRHGDYAYLRCQGCKSGGYGAPNPQEVYDRLVEQVLAVLGDFPVEMREYARGEEKRKELKRLEESIAYYMKELEPGGRFTKTRFTQDQAEGTLDKLIAELEAIDPESAKDRWVYVAGGKTFREHWEEGGIDAMSADLIRAGIRCQVTRTKVPKVRAPQVHLKLMIPKDVRTRLVIRPDDFGQTF

SEQ ID NO: 386 - protein, 547 aa, Artificial Sequence
  Synthetic
MWACSHLRADGTTPTSSSTLLTMSARDYDIEAEWTPADLALLKELEEAEALLPADAPRALLSVRLSVFTDDTTSPVRQELDLRQLAREKGHRVVGLASDLNVSATKVPPWKRKSLGDWLNNRAPEFDALLFWKIDRFIRNLNDLNVMIRWSETYSKNLISKNDPIDLTTTMGKMMVSLLGGVAEIEAANTKTRVESLWDYTKTQGEWHVGKPPFGYKTARDEAGKVVLIEDPLAVETLHTARELVMSGMSTTAAAKVLKERGLISSTTATLTRRLRNPGVLGLRVEEDKDGGIRRSKLILGRDGQPIRIADPIFTEEQFEELQAVLDKRGKRQPHRQPGGATSFLGVLKCAECGTNMINHFTRNRHGDYAYLRCQGCKSGGYGAPNPQEVYDRLVEQVLTVLGDFPVEMREYARGEEKRKELKRLEESIAYYMKELEPGGRFTKTRFTQDQAEGTLDKLIAELEAIDPESAKDRWVYVAGGKTFREHWEEGGIDAMSADLIRAGIMCQVTRTKVPKVRAPQVHLKLMIPKDVRTRLVIRPDDFGQTF

SEQ ID NO: 387 - protein, 529 aa, Artificial Sequence
  Synthetic
MSDRASTYDIEAEWSPADLALLRSLEEAETLLPPDAPRALLSVRLSVFTEDTTSPVRQELDLRQLARDKGMRVVGVASDLNVSATKVPPWKRKELGDWLGNKTPQFDALLFWKIDRFIRNMGDLSRMIEWANRYEKNLISKNDPIDLKTPIGKMMTTLLGGVAEIESANTKARVESLWDYAKTQSDWLVGKPAYGYVTQRDESGKVSLAVDPKAREALHLARELVLGGMAARSVAEELKKREMVTPGLTAATLLRRMRNPALMGYRVEEDKRGGLRRSKLVLGHDGKPIRVADPVFTEEEFETLQAVLDSRGKNQPPRQPSGATKFLGVLKCVDCRSNMIVHFTRNKHGEYAYLRCQKCKSGGLGAPHPQEVYDALVEQVLAVLGDFPVERREYARGEEARAEVKRLEESIAYYMQGLEPGGRYTKTRFTRENAERALDKLIAELEAVDPETTEDRWIYEPIGKTFRQHWEEGGMEAMALDLIRAGITCDVTRTKVPRVRAPQVELDLDIPSDVRERLVMRRDDFAEAF

SEQ ID NO: 388 - protein, 470 aa, Artificial Sequence
  Synthetic
MSKRAVIYTRVSRDDTGEGQSNQRQEAECRRLTDYRRLDVVAVEADISISASKGLERPAWLRVLGMIERGEVDYVIAYHMDRVTRSMTELEQLIEMCLKYDVGVATVSGDIDLTTDVGRMVARIIGAVARAEVERKSARQKLANAQRAAEGKPHVSGIRPFGYADDHRQVVTIEAQAIRAAAEAALAGESMIGIAESWSKDGLLSARARRGHDKGNRPTKAAWSARGVRNVLVNPRYAGIRLYNGERVGQGDWEPILDVETHLRLVEKLTDPTRRKGTVKTGRVAASLLTAIARCEVCGQTVRASSVRGRQTYACRNSHAHVDRSTADLMTQEWVISRLADPDTLAKLAPSGDDRVDEAKATIEKRREALKTYARLLATGAMDEDQFTEASAVARSEMQEAEAVLTEAGTGDLLAGLDVGSDAVGPQFLALSLARQRGIVEALVDVTLRPASKARKVVTPEHERVVLADR

SEQ ID NO: 389 - protein, 497 aa, Artificial Sequence
  Synthetic
MRVLGRIRLSRMMEESTSVERQREFIETWARQNDHEIVGWAEDLDVSGSVDPFDTQGLGPWLKEPKLREWDILCAWKLDRLARRAVPLHKLFGMCQDEQKVLVCVSDNIDLSTWVGRLVASVIAGVAEGELEAIRERTLSSQRKLRELGRWAGGKPAYGFKAQEREDSAGYELVHDEHAANVMLGVIEKVLAGQSTESVARELNEAGELAPSDYIRARAGRKTRGTKWSNAQIRQLLKSKTLLGHVTHNGATVRDDDGIPIRKGPALISEEKFDQLQAALDARSFKVTNRSAKASPLLGVAICGLCGRPMHIRQHRRNGNLYRYYRCDSGSHSGGGGAAPEHPSNIIKADDLEALVEEHFLDEVGRFNVQEKVYVPASDHRAELDEAVRAVEELTQLLGTMTSATMKSRLMGQLTALDERIARLENLPSEEARWDYRATDQTYAEAWEEADTEGRRQLLIRSGITAEVKVTGGDRGVRGVLEFHLKVPEDVRERLSA

SEQ ID NO: 390 - protein, 493 aa, Artificial Sequence
  Synthetic
MRVLGRIRLSRVMEESTSVERQREIIETWARQNDHEIIGWAEDLDVSGSVDPFETPALGPWLTDHRKHEWDILVAWKLDRLSRRAIPMNKLFGWVMENDKTLVCVSENLDLSTWIGRMIANVIAGVAEGELEAIRERTKGSQKKLRELGRWGGGKPYYGYRAQEREDAAGWELVPDEHASAVLLSIIEKVLEGQSTESIARELNERGELSPSDYLRHRAGKPTRGGKWSNAHIRQQLRSKTLLGYSTHNGETIRDERGIAVRKGPALVSQDVFDRLQAALDSRSFKVTNRSAKASPLLGVLICRVCERPMHLRQHHNKKRGKTYRYYQCVGGVEKTHPANLTNADQMEQLVEESFLAELGDRKIQERVYIPAESHRAELDEAVRAVEEITPLLGTVTSDTMRKRLLDQLSALDARISELEKLPESEARWEYREGDETYAEAWNRGDAEARRQLLLKSGITAAAEMKGREARVNPGVLHFDLRIPEDILERMSA

SEQ ID NO: 391 - protein, 502 aa, Artificial Sequence
  Synthetic
MRVLGRLRLSRSTEESTSIERQREIVTAWAESNGHTLVGWAEDVDVSGAIDPFDTPSLGPWLDERRGEWDILCAWKLDRLGRDAIRLNKLFGWCQEHGKTVASCSEGIDLSTPVGRLIANVIAFLAEGEREAIRERVTSSKQKLREVGRWGGGKPPFGYMGIPNPDGQGHILVVDPVAKPVVRRIVDDILDGKPLTRLCTELTEERYLTPAEYYATLKAGAPRQKAEPDETPAKWRPTALRNLLRSKALRGYAHHKGQTVRDLKGQPVRLAEPLVDADEWELLQETLDRVQANWSGRRVEGVSPLSGVVVCITCDRPLHHDRYLVKRPYGDYPYRYYRCRDRHGKNLPAEMVETLMEESFLARVGDYPVRERVWVQGDTNWADLKEAVAAYDELVQAAGRAKSATAKERLQRQLDALDERIAELESAPATEAHWEYRPTGGTYRDAWETADTDERREILRRSGIVLAVGVDGVDGRRSKHNPGALHFDFRVPEELTQRLGVS

SEQ ID NO: 392 - protein, 512 aa, Artificial Sequence
  Synthetic
MRTNEHNFHNIEEEIKHVAVYLRLSRGEDESELDNHKTRLLNRCELNNWSYELYKEIGSGSTIDDRPVMQKLLTDVEKNLYDAVLVVDLDRLSRGNGTDNDRILYSMKVSETLIVVESPYQVLDANNESDEEIILFKGFFARFEFKQINKRMREGKKLAQSRGQWVNSVTPYGYIVNKTTKKLTPSEEEAKVVIMIKDFFFEGKSTSDIAWELNKRKIKPRRATEWRSSSIANILQNEVYVGNIVYNKSVGNKKPSKSKTRVTTPYRRLPEEEWRRVYNAHQPLYSKEEFDRIKQYFECNVKSHKGSEVRTYALTGLCKTPDGKTMRVTQGKKGTDDDLYLFPKKNKHGDSSIYKGISYNVVYETLKEVILQVKDYLDSVLDQNENKDLVEELKEELMKKEDELETIQKAKNRIVQGFLIGLYDEQDSIELKVEKEKEIDEKEKEIEAIKMKIDNAKTVNNSIKKTKIERLLSDVQSAESEKEINRFYKTLIKEIIVDRTDENEAKIKVNFL

SEQ ID NO: 393 - protein, 582 aa, Artificial Sequence
  Synthetic
MTNPASRPKAYSYIRMSSAIQIKGDSFRRQAEASAKYAAEHDLDLIDDYKLADLGVSAFKSDNLTTGALGRFVAECEAGEIEAGSFLLIESLDRLSRDKILDAFSLFARILKTGVKIVTLSDGQVYDGSSDQVGSIYYAISVMIRSNDESKIKSTRGLANWSQKRKLAAEHGVKMSSQCPAWLKLSVDRKSYLIDKERAKIVQRIFEASASGKGANLITKELNRDKVPTFGRGALWAEAFVSKTLRNRAVLGEFQPGQYVSGKRQPAGDPIPGYFPPVIEEELFDIVQASLRGRLLAGGRRGEGQSNIFTHVAFCGYCGSKMRHRSKGSRVKGNPPHRYLTCFNRFNGPGCDCKPLPYAAFERSFLTFVRDVDLRGLLEGAKRKSEAKTIADRITVNEEKVRKADERIRDYLIKIEGAPDLAEIFMERIRELKAEKDDLVRSIEESNDALSKIKSDNVTDEELASLISTFQNPCGENRIRLADRIKSIIERIDVYPNGEIRKDDPAIDLVRASGDPDAEKIIAAMNAGSRLKDDPYFIVTFRNGAVQTVVPNPSNPDDIRVSVYAGEKTRRVEGSAYEYESD

SEQ ID NO: 394 - protein, 580 aa, Artificial Sequence
  Synthetic
MDPQHKPTRALIVIRLSRLTDETTSPERQLEACERFCAARGWEVVGVAEDLDVSAGTTSPFERPSLSQWIGDGKDNPGRIGEFDTVVFYRVDRLVRRVRHLHDVIAWSERFDVNMVSATESHFDLSTTIGALIAQLVASFAEMELEGISQRATSAHRHNVQLGKFVGGSPPFGYMPEETPDGWRLVHDPDVVPIILEVVDRVLEGEPLRRITDDLNARGATTARDLVKQRKGKETEGHKWHSNVLKRRLMSPAMLGYALRREPLTDSKGKPKLSAKGAKLYGPEEIVRGPDGLPVQRAEPILPKPLFDRVVAELEARELQKEPTKRINSMLLRVLYCGVCGQPVYRAKGQGGRSDRYRCRSIQDGANCGNPSVLTYELDDLVEESILVLMGDSERLAHVWNPGEDNASELAEVEARLADRTGLIGVGAYKAGTPQRATLDTLIEADAKLYERLKAATPRPAGWTWEPTGETFAEWWAALDTGARNVYLRNMGVRVTYDKRPVPEQVSAGEKPRVHLELGEVRKMAEQVAVTGTIGTLTRNYTRLGEIGITHVDIDAGSGKAVFVTKSGERFELPLNIPEE

SEQ ID NO: 395 - protein, 458 aa, Artificial Sequence
  Synthetic
MNYERSYLRSCQVSTLEQKEHGYSIEEQERKLKSFCEINDWSVSDVFIDAGFSGAKRDRPELQRMMNDIKRFDLVLVYKLDRLTRNVRDLLDLLEVFEQNNVAFRSATEVYDTSTAMGRLFVTLVGAMAEWERETIRERVMMGKRAAIKQGMILTPPPFYYDRVDNTYIPNDYKKVVLWAYDEVMKGNSSKAIARKLNDSDIPPPNGKRWEDRTITRALRNPITRGHYTWGDVFIENSHEPIITEEMYQQIKERLEERINTKIVSHVSVFRGKFICPRCGGTLTMNTATRKRKKGYVTYKTYYCNTCKTKKQSFGFSENEALRVFRDYLSKLDLDKYEVKTKQKDDVVTIDIDKIMEQRKRYHKLYAKGLMQEEELFELIKETDETIAEYEKQKELVPRKSLDIDKIKKFKNALLESWKIFSLEDKADFIKMAIKSIDIDYVKLKNRHSIKINDIEFY

SEQ ID NO: 396 - DNA, 69 bp, Artificial Sequence
  Synthetic
tctaactcacgacacgttgtactcttaccaaccgcacttgcggtatgtcaatatggcaaaaagctattc

SEQ ID NO: 397 - DNA, 68 bp, Artificial Sequence
  Synthetic
catttttaccttgctcttctctcgaatttcagcatctgcggtatgcttatagggacaaaaattataaa

SEQ ID NO: 398 - DNA, 68 bp, Artificial Sequence
  Synthetic
acaatcaacaaagatgtatggtggtacatgcattaatatttaatgtgtatacttccgtatttttattt

SEQ ID NO: 399 - DNA, 68 bp, Artificial Sequence
  Synthetic
tacagacttacatgggaccattctatagcagctttaaaatacttagcaataaaacaggggaattgata

SEQ ID NO: 400 - DNA, 68 bp, Artificial Sequence
  Synthetic
tgtaatttcggacacgagttcgactctcgtcatctccaccatttctatcaatatacataggaaatagt

SEQ ID NO: 401 - DNA, 68 bp, Artificial Sequence
  Synthetic
atatgttcccgcaaacagcacacgttgagacggtagtattgatgtcaagggttgataagtaagcgtgt

SEQ ID NO: 402 - DNA, 69 bp, Artificial Sequence
  Synthetic
tcggcttagtgatgccgagttcagctggtaaaccttgggcgattgcgaggtttaaggctttccactttt

SEQ ID NO: 403 - DNA, 69 bp, Artificial Sequence
  Synthetic
gtcttctggaccatgatgcgccacttctgaaatttcaaatacagattaatgttgtataaagtagccctg

SEQ ID NO: 404 - DNA, 69 bp, Artificial Sequence
  Synthetic
cgggcaaattgctgccatatggaccggaggcgggactctacaacctatattagacatcttataaaaagt

SEQ ID NO: 405 - DNA, 68 bp, Artificial Sequence
  Synthetic
tgatttgattgtattggatattatgttaccagatggcgaaggactttttgtacaacaaaaagtcacaa

SEQ ID NO: 406 - DNA, 69 bp, Artificial Sequence
  Synthetic
gcccgtggatttgtttccaatgacgcatcacgtggagtgtgttgctctgctcgtaaaagcctagaaacc

SEQ ID NO: 407 - DNA, 69 bp, Artificial Sequence
  Synthetic
gctggtggtggatatcggcggtggtacgactgactgttcgtagtcatgcaagaatgtacaccgcagtaa

SEQ ID NO: 408 - DNA, 69 bp, Artificial Sequence
  Synthetic
ggaggctaaaaccttttttgcctgataatcatacaaatgtgttatgcttatacaaacaaaaattagaag

SEQ ID NO: 409 - DNA, 68 bp, Artificial Sequence
  Synthetic
agctaagtgtccaagctggcccccgatcccagtttcaattggaaatacctaatatacgaaaaaaggcg

SEQ ID NO: 410 - DNA, 68 bp, Artificial Sequence
  Synthetic
acaacaaagacgctaaggtttacgtggttaatggagacaagagtatctaaatatcctgtttttttcgc

SEQ ID NO: 411 - DNA, 68 bp, Artificial Sequence
  Synthetic
ccccaaagtcggcttcgtcagccttggctgcccgaaggccctctgaagtaaactcttatgacgccccg

SEQ ID NO: 412 - DNA, 68 bp, Artificial Sequence
  Synthetic
atatcccaaatggaaaagttgttaaaccgtgtataatcttacggtaaccaataaccaactttaaaact

SEQ ID NO: 413 - DNA, 68 bp, Artificial Sequence
  Synthetic
aacgtttgtaaaggagactgataatggcatgtacaactatactagttgtagtgcctaaataatgcttt

SEQ ID NO: 414 - DNA, 69 bp, Artificial Sequence
  Synthetic
gcccaggtgtgtctgaggtcatggaaacggaaatcttcaattcctgcacgacgacaagctgatagccat

SEQ ID NO: 415 - DNA, 69 bp, Artificial Sequence
  Synthetic
taacaccaattaagtgtttagttccctctttgcgtccaacgagagaaaacgaggaactaaacaatctaa

SEQ ID NO: 416 - DNA, 68 bp, Artificial Sequence
  Synthetic
ctgagtgggcgaactatttatcttttacaatgccaatgccatgtataattaggggataaaaataaaaa

SEQ ID NO: 417 - DNA, 69 bp, Artificial Sequence
  Synthetic
gaaactatggggattatagcgtttgagggagcaagtgcggtgtataattaaggcataaaataaaaaacg

SEQ ID NO: 418 - DNA, 68 bp, Artificial Sequence
  Synthetic
ccgtcccgcgacggaccgaacccagtcgttgagcccgctgtaaatcggtctatgacatctaactaata

SEQ ID NO: 419 - DNA, 69 bp, Artificial Sequence
  Synthetic
agactcaaaaactgcaaccttaaagctttcacattgcttgagataagagtatctaaaattcacactttt

SEQ ID NO: 420 - DNA, 69 bp, Artificial Sequence
  Synthetic
gacgacgtcaaatgagaaatctgttacacgtgtaacaatgcctgtatctaaatacctctaaagaaagac

SEQ ID NO: 421 - DNA, 68 bp, Artificial Sequence
  Synthetic
gttaacaagcactttagacggaatacagccatggttggttaattgtgcatacttccataaaatattaa

SEQ ID NO: 422 - DNA, 69 bp, Artificial Sequence
  Synthetic
agaactgcgctttttacaacaagagcattttgtttgtgtaaacataacataaatactaataaaatgtta

SEQ ID NO: 423 - DNA, 68 bp, Artificial Sequence
  Synthetic
tataggctgacataagtgtactgtggcgattgtactggtttaactctctaccatgtacactttttttc

SEQ ID NO: 424 - DNA, 68 bp, Artificial Sequence
  Synthetic
taaggataagaaggttaaagcatttacacttttagaaatcaaggatagtaaatttctttatattttcc

SEQ ID NO: 425 - DNA, 68 bp, Artificial Sequence
  Synthetic
attccaaccatcaccaagaacatctttacttccaagttcgataccatttgaaaacacaggagaacgag

SEQ ID NO: 426 - DNA, 68 bp, Artificial Sequence
  Synthetic
tctggcggcagtgcatttcaaacaccatggtttggtcaattaaacacaacctaactacattaaataaa

SEQ ID NO: 427 - DNA, 69 bp, Artificial Sequence
  Synthetic
tcctaagggctaattgcaggttcgattcctgcaggggacaccatttatcagttcgctcccatccgtacc

SEQ ID NO: 428 - DNA, 69 bp, Artificial Sequence
  Synthetic
aaatagaaaaatgaatccgttgaagcctgcttttttatactaagttggcattataaaaaagcattgctt

SEQ ID NO: 429 - DNA, 68 bp, Artificial Sequence
  Synthetic
gacgaaatagatattttttgtggccattaagcgcatgaggttgttaccaacagggtgataacaaagct

SEQ ID NO: 430 - DNA, 68 bp, Artificial Sequence
  Synthetic
aacgaagtagatgttttttgttgccattaggcgcatgaggttgacgacaacatggtagcgacaatata

SEQ ID NO: 431 - DNA, 68 bp, Artificial Sequence
  Synthetic
aatattaataagttatattgggggaacgtgtgcggtctaccgcgtaacacaccattcatcaaaattta

SEQ ID NO: 432 - DNA, 69 bp, Artificial Sequence
  Synthetic
atcgctgtagcgcataaatacgttatgagacacgcagatgccgacagactatatagacaaaaataaaac

SEQ ID NO: 433 - DNA, 69 bp, Artificial Sequence
  Synthetic
catctttactttgctcttttctcgaatttcagcatctgcggtatgcttatagggacaaaaattataaac

SEQ ID NO: 434 - DNA, 69 bp, Artificial Sequence
  Synthetic
atcccatgatgagccgagatgacataacccaccatttcaattaaagatactaaatctcttgatttttga

SEQ ID NO: 435 - DNA, 68 bp, Artificial Sequence
  Synthetic
tcaaaagttaagggttaaagcatttacgcttttagaatgtttggtatctaaaactcacgcttttttga

SEQ ID NO: 436 - DNA, 68 bp, Artificial Sequence
  Synthetic
gttactatagctcagatgattaagggacacagcctacttcccgtttttcccgatttggctacatgaca

SEQ ID NO: 437 - DNA, 68 bp, Artificial Sequence
  Synthetic
gaatgatgcgttggggcttaatggagtaaatctaattacaccaacaaggtgacgacaaagcataaacg

SEQ ID NO: 438 - DNA, 68 bp, Artificial Sequence
  Synthetic
ggatcaaaaagaacgacgattctttagtgtttttgaaataatcttactgagtttaatacaatgccgtg

SEQ ID NO: 439 - DNA, 69 bp, Artificial Sequence
  Synthetic
ggaaattaatgagccgtttgaccactgatctttttgaaaataaagagcaatgttgtacatcaagatgca

SEQ ID NO: 440 - DNA, 69 bp, Artificial Sequence
  Synthetic
gtcttctggaccatgatgcgccacttccgaaatttcaaatacagaataatgttgcatataatattacta

SEQ ID NO: 441 - DNA, 69 bp, Artificial Sequence
  Synthetic
gtcttctggaccatgatgcgccacttccgaaatttcaaatacagaataatgttgcatataatatcacta

SEQ ID NO: 442 - DNA, 69 bp, Artificial Sequence
  Synthetic
gtcttctggaccatgatgcgccacttccgaaatttcaaatacagattaatgttgtataaagtaaccctg

SEQ ID NO: 443 - DNA, 69 bp, Artificial Sequence; identical to SEQ ID NO: 440
  Synthetic

SEQ ID NO: 444 - DNA, 68 bp, Artificial Sequence
  Synthetic
acaatcaacaaagatgtatggcggtacatgcattaatatttaatgtgtatacttccgtattattgttt

SEQ ID NO: 445 - DNA, 68 bp, Artificial Sequence
  Synthetic
atgaattaatgttttagtcggtatacatccgatattaatcaagtgtctatacttccgtacataagtta

SEQ ID NO: 446 - DNA, 68 bp, Artificial Sequence
  Synthetic
acaatcaacaaagatgtatggtggtacatgcattaatatttaatgtgtatacttccgtatttttgttt

SEQ ID NO: 447 - DNA, 69 bp, Artificial Sequence
  Synthetic
ctgtttcaacaaatgatgctcttggccttaatggtgtaaacctaattacaccaagaggatgacgacaaa

SEQ ID NO: 448 - DNA, 69 bp, Artificial Sequence
  Synthetic
agaaaaagtgaatgtattcactgttggctggattggagttgcaacacaactacaaatgcagtataaagg

SEQ ID NO: 449 - DNA, 69 bp, Artificial Sequence
  Synthetic
atacgatttcggacaggggttcgactcccctcgcctccaccagcaaaggtcacaatcgtgtcgatgtca

SEQ ID NO: 450 - DNA, 69 bp, Artificial Sequence
  Synthetic
aaccagctgtaactttttcggatcaagctatgagggaagaagaataaacgagataccaaaaaagaacat

SEQ ID NO: 451 - DNA, 69 bp, Artificial Sequence
  Synthetic
tatgcaacccgtcgatatgttcccgcaaacagctcacatcgagtgtgtaggactgcttacacgtgtgga

SEQ ID NO: 452 - DNA, 69 bp, Artificial Sequence
  Synthetic
tatcttttaactgcaagagtactacggtttccacgtgcgttgagagtacactctgtatcttcctactat

SEQ ID NO: 453 - DNA, 69 bp, Artificial Sequence
  Synthetic
aaccagctgtaactttttcggatcgagttatgatggaagaagaagaaacgagaaactaaaattataaat

SEQ ID NO: 454 - DNA, 68 bp, Artificial Sequence
  Synthetic
ttttccccgaaaatctttaacaccgctatccgttgatgttcactccattaattaccaaaatttaaaaa

SEQ ID NO: 455 - DNA, 69 bp, Artificial Sequence
  Synthetic
ggatcagaaggttaggggttcgactcctcttgggtgcgccatcgattaaccctaactgataaataaaaa

SEQ ID NO: 456 - DNA, 68 bp, Artificial Sequence
  Synthetic
ttttcccccgaaaatctttaacaccactatctgttgatattcactccattaattaccaaaaaaacagg

SEQ ID NO: 457 - DNA, 68 bp, Artificial Sequence
  Synthetic
gtaaactaaaatatgcccagaccccattgcgttatccgttgccactctgaaattgatacaatgtaaca

SEQ ID NO: 458 - DNA, 68 bp, Artificial Sequence; identical to SEQ ID NO: 457
  Synthetic

SEQ ID NO: 459 - DNA, 69 bp, Artificial Sequence
  Synthetic
cttgtggatcacctggtttttcgtgttcagatacacacatgtaaagtagacataaacagcaaaaatttg

SEQ ID NO: 460 - DNA, 68 bp, Artificial Sequence
  Synthetic
gaaggcagaccattaacaggaagggatggagcatttacaccatttataaaaaagctgctggaggcaag

SEQ ID NO: 461 - DNA, 69 bp, Artificial Sequence
  Synthetic
ggaaattaatgagccgtttgaccactgatctttttgaaaataaagagcaatgttgtacatcaagataca

SEQ ID NO: 462 - DNA, 69 bp, Artificial Sequence; identical to SEQ ID NO: 440
  Synthetic

SEQ ID NO: 463 - DNA, 69 bp, Artificial Sequence
  Synthetic
gcttctgcttggattttacgccatccagccaatatgcacatggtagcatgagtgttctatgaaaaaaga

SEQ ID NO: 464 - DNA, 69 bp, Artificial Sequence; identical to SEQ ID NO: 440
  Synthetic

SEQ ID NO: 465 - DNA, 68 bp, Artificial Sequence
  Synthetic
agcttttattgcaagaaaaatgggttataagtacacatcaccatatttgacaaaaaacctataaataa

SEQ ID NO: 466 - DNA, 69 bp, Artificial Sequence
  Synthetic
aaccagctgtaactttttcggatcgagttatgatggagggagaagaaacgggataccaaaaataaagac

SEQ ID NO: 467 - DNA, 69 bp, Artificial Sequence
  Synthetic
acgtttgtaaaggagactgataatggcatgtacaactatactcgttgtagtgcctaaataatgctttta

SEQ ID NO: 468 - DNA, 68 bp, Artificial Sequence
  Synthetic
acaatcatcagataactatggcggcacgtgcattaatgttgagtgaacaaacttccataataaaataa

SEQ ID NO: 469 - DNA, 68 bp, Artificial Sequence
  Synthetic
aacaatctgcaaacatgtatggcggtacatgtatcaatatccatgttacttagtgccatacaaaaacc

SEQ ID NO: 470 - DNA, 69 bp, Artificial Sequence
  Synthetic
acagcctgtggatatgtttgcacagactgctcacgtggagacggtagtattgatgtcacgaaaagaaaa

SEQ ID NO: 471 - DNA, 68 bp, Artificial Sequence
  Synthetic
cgagacgagaaacgttccgtccgtctgggtcagttgcctaaccttaacttttacgcaggttcagctta

SEQ ID NO: 472 - DNA, 69 bp, Artificial Sequence
  Synthetic
attctcctttaacgaatgaagcgactaattcgatatggcttgagaggacagaatgaatgtcatttgagt

SEQ ID NO: 473 - DNA, 69 bp, Artificial Sequence
  Synthetic
cagccggctgatttatttccaaatacgcatcacgtggagtgtgttgctctgcttgtaaaagcttagaaa

SEQ ID NO: 474 - DNA, 69 bp, Artificial Sequence; identical to SEQ ID NO: 451
  Synthetic

SEQ ID NO: 475 - DNA, 69 bp, Artificial Sequence
  Synthetic
aacagaagaagggaagttctacctattgatacctttggcaaagggcacgagtttgatacaaaatgcacc

SEQ ID NO: 476 - DNA, 69 bp, Artificial Sequence; identical to SEQ ID NO: 475
  Synthetic

SEQ ID NO: 477 - DNA, 69 bp, Artificial Sequence; identical to SEQ ID NO: 475
  Synthetic

SEQ ID NO: 478 - DNA, 69 bp, Artificial Sequence
  Synthetic
gtctcgctcgcccaccgcggggtgctctttctggacgaggcatgtaaaacaggtgggcttgatcagcta

SEQ ID NO: 479 - DNA, 69 bp, Artificial Sequence
  Synthetic
cactacagtatgcagattttgcagcttggcagcgtgaatagcccgttatgaatactaaaaattccactc

SEQ ID NO: 480 - DNA, 68 bp, Artificial Sequence
  Synthetic
tcatcactacttaatatatccataagagaaatttcattacccacttcatgttgtatgttatgtaaaaa

SEQ ID NO: 481 - DNA, 68 bp, Artificial Sequence
  Synthetic
tctggtggcagtgcatttcaaacaccgtggtttggtcaattaaacacaacctaactacatcaaatgaa

SEQ ID NO: 482 - DNA, 69 bp, Artificial Sequence
  Synthetic
gttttttgtagccattaggcgcatgaggtttacgccaacagggtgataacaaaagaaggattttttaat

SEQ ID NO: 483 - DNA, 69 bp, Artificial Sequence
  Synthetic
gatcacccaggacgtctgcgccttctacgaggaccatgccttacaagctcaaaatagcacacgtttccg

SEQ ID NO: 484 - DNA, 68 bp, Artificial Sequence
  Synthetic
gcaaccggcatcagtgtaataccgataatcgtaacaagcaaccttaatcgggtactacttaatatcta

SEQ ID NO: 485 - DNA, 68 bp, Artificial Sequence
  Synthetic
gtgaggatgcgctcggagtcgaccagcgccttggggcaccctaacgaaacccatcctatactaggggc

SEQ ID NO: 486 - DNA, 68 bp, Artificial Sequence
  Synthetic
acaagaccccatcggaacagataaagaaggtaatgaaataaacactactatttatatgttattttcta

SEQ ID NO: 487 - DNA, 69 bp, Artificial Sequence; identical to SEQ ID NO: 407
  Synthetic

SEQ ID NO: 488 - DNA, 68 bp, Artificial Sequence
  Synthetic
ccatcataagatgcctttttaccgacgagtatagttgtacatgaaaaacgctgtatttttttatccat

SEQ ID NO: 489 - DNA, 68 bp, Artificial Sequence
  Synthetic
ccactcccaaagtcggcttcgtcagtcttggatgcccctacgaatagaaaaatatactaattctcagg

SEQ ID NO: 490 - DNA, 68 bp, Artificial Sequence
  Synthetic
cactcccaaagtcggcttcgtcagtcttggatgccccaacgaatagaaaagtaaactagctttcagcg

SEQ ID NO: 491 - DNA, 69 bp, Artificial Sequence
  Synthetic
accagctgtaactttttcggatcaagctatgagggacggagacgaatcgagaaactaaaattataaata

SEQ ID NO: 492 - DNA, 68 bp, Artificial Sequence
  Synthetic
agttcagcccgtggatttgtttccaatgacgcatcacatcgagtgtgtggttctgctcgtaaaagcct

SEQ ID NO: 493 - DNA, 69 bp, Artificial Sequence
  Synthetic
agaaatcactcagcaagagttagccaggcgaattggcaacccgaatgtagtcaacccaaaataactaaa

SEQ ID NO: 494 - DNA, 69 bp, Artificial Sequence
  Synthetic
cagccgactgatttgtttccgaatacgcatcacgtggagtgtgtggttctgctcgtaaaagcctagaaa

SEQ ID NO: 495 - DNA, 69 bp, Artificial Sequence; identical to SEQ ID NO: 403
  Synthetic

SEQ ID NO: 496 - DNA, 68 bp, Artificial Sequence; identical to SEQ ID NO: 405
  Synthetic

SEQ ID NO: 497 - DNA, 69 bp, Artificial Sequence
  Synthetic
aaaatgtgtagacatgtttccttatacgacacatgttgagtgcgtcacattgatgtcaagggtttagaa

SEQ ID NO: 498 - DNA, 68 bp, Artificial Sequence
  Synthetic
aataacaaactattttttatagaaacatggggatgtccgtatgtagaaaatagtaggaatatatgaga

SEQ ID NO: 499 - DNA, 69 bp, Artificial Sequence
  Synthetic
taacaccaattaagtgtttagttccctctttgcgtccaacgagaggaaatgaggcactaaaccagttga

SEQ ID NO: 500 - DNA, 69 bp, Artificial Sequence
  Synthetic
taacaccaattaagtgtttagttccctctttgcgtccaacgagagaaaacgaggtactaaataagctaa

SEQ ID NO: 501 - DNA, 69 bp, Artificial Sequence
  Synthetic
taacaccaattaaatgtttagttccctctttgcgtccaacgagagaaaacgaggtactaaataagctaa

SEQ ID NO: 502 - DNA, 68 bp, Artificial Sequence
  Synthetic
ggtgaggatgcgctcggagtcgaccagcgccttggggcaccctaacgaaacccatcctatactagggg

SEQ ID NO: 503 - DNA, 68 bp, Artificial Sequence
  Synthetic
tttatcccgtaaggacatgaatggtaccacttctactgtagttgttacaaaacattcacgtaaaaaaa

SEQ ID NO: 504 - DNA, 68 bp, Artificial Sequence
  Synthetic
tatcccgtaaggacatgaatggtaccacttctaccgcaatagttacaaaacattcattaaaaataacc

SEQ ID NO: 505 - DNA, 68 bp, Artificial Sequence; identical to SEQ ID NO: 438
  Synthetic

SEQ ID NO: 506 - DNA, 68 bp, Artificial Sequence
  Synthetic
cactcccaaagtcggcttcgtcagtcttggatgccccaatgattgcaaaagtaaactcaatctttaag

SEQ ID NO: 507 - DNA, 69 bp, Artificial Sequence
  Synthetic
gtggatcacctggtttttcgtgttcagatacaggcatgtaaagtagacataaacagcaaaaatttgata

SEQ ID NO: 508 - DNA, 69 bp, Artificial Sequence
  Synthetic
tctatttaaattgtctattttattgacaggggaccaatctctgctaagattaccaaataaccccgacaa

SEQ ID NO: 509 - DNA, 69 bp, Artificial Sequence; identical to SEQ ID NO: 508
  Synthetic

SEQ ID NO: 510 - DNA, 69 bp, Artificial Sequence
  Synthetic
ccgagctgccgatcaccgagatcgcgttcgcgtccggctttccgagtgcgcgtgaactacagttctagc

SEQ ID NO: 511 - DNA, 69 bp, Artificial Sequence; identical to SEQ ID NO: 483
  Synthetic

SEQ ID NO: 512 - DNA, 69 bp, Artificial Sequence; identical to SEQ ID NO: 491
  Synthetic

SEQ ID NO: 513 - DNA, 69 bp, Artificial Sequence
  Synthetic
actggcgaagcgattcttggtgcgaacattttccgtgatatgtttaccaaatgacaaaaatgatataat

SEQ ID NO: 514 - DNA, 68 bp, Artificial Sequence
  Synthetic
ttctaactcacgacacgttgtgctcttaccaaccgcacttgcggtatgtcaataagacatacgaattt

SEQ ID NO: 515 - DNA, 68 bp, Artificial Sequence
  Synthetic
ggtgaggatgcgctcggagtcgaccagcgccttggggcaccctaacgaaacccatcctatactaggga

SEQ ID NO: 516 - DNA, 69 bp, Artificial Sequence
  Synthetic
gctgtggcggttccaaattggtgaggcgccaaatccgctcaacttggtggcgaccgatgcctgcggtca

SEQ ID NO: 517 - DNA, 69 bp, Artificial Sequence
  Synthetic
aaaatctaaattttcttttggcagaccttcttcgctagtgagtgttatattaacccaaaaagagcctac

SEQ ID NO: 518 - DNA, 68 bp, Artificial Sequence; identical to SEQ ID NO: 399
  Synthetic

SEQ ID NO: 519 - DNA, 69 bp, Artificial Sequence
  Synthetic
atcacgatggggagcagttcgatgtaccccatctccaccacttacccaaaacccaacccttatcggttg

SEQ ID NO: 520 - DNA, 68 bp, Artificial Sequence
  Synthetic
ggttaagtgtatggatatgttcccaaatactccacacgttgagtgcgtagtattgatgtcaagggttg

SEQ ID NO: 521 - DNA, 69 bp, Artificial Sequence
  Synthetic
aaccagctgtaactttttcggatcaagctatgagggaagaagaagaaacgagataccaaaaaaagaaca

SEQ ID NO: 522 - DNA, 68 bp, Artificial Sequence
  Synthetic
cgtttatgaatgacttgatttttggtatgtaaagtataagcatgtaaacttaacataaatacaaataa

SEQ ID NO: 523 - DNA, 68 bp, Artificial Sequence
  Synthetic
tcttcaagatccaataggaatagataaagaaggcaatgaattaccctggacaagttgtcagtctaggg

SEQ ID NO: 524 - DNA, 68 bp, Artificial Sequence
  Synthetic
aacagttcctttttcaatgttactgtaacctgatgtgtactttacaaaaacactattttatataaata

SEQ ID NO: 525 - DNA, 68 bp, Artificial Sequence
  Synthetic
ggggcaaattgctgcgatttgggttggagggggaaccccagcatagacaatatacatataatctttct

SEQ ID NO: 526 - DNA, 69 bp, Artificial Sequence; identical to SEQ ID NO: 440
  Synthetic

SEQ ID NO: 527 - DNA, 68 bp, Artificial Sequence
  Synthetic
atgaattaatgttttagtcggtatacatccgatattaatcaggtgtctatacttccgtacatatgtta

SEQ ID NO: 528 - DNA, 68 bp, Artificial Sequence
  Synthetic
gatgttcgtagcaactatgggaggaaccggtgcaacggctatagttacataacccacattaaaatata

SEQ ID NO: 529 - DNA, 68 bp, Artificial Sequence
  Synthetic
atgaattaatgttttagtcggtatacatccgatattaatagagtgtctatacttccgtacatatgtta

SEQ ID NO: 530 - DNA, 68 bp, Artificial Sequence
  Synthetic
acagtttacagaaagctatggcggtacatgcataaatgtatagtgtgtgtacttccatatatttatgc

SEQ ID NO: 531 - DNA, 68 bp, Artificial Sequence
  Synthetic
atagaagcacactgatgatgagcaagaccaccaacatctcaataaaggatagtaaaattattgatttt

SEQ ID NO: 532 - DNA, 69 bp, Artificial Sequence; identical to SEQ ID NO: 491
  Synthetic

SEQ ID NO: 533 - DNA, 68 bp, Artificial Sequence
  Synthetic
ggatttcgttgcactgatgggcggtactggcgcgacctacaaagtgctaaaccatacatgttaaaaat

SEQ ID NO: 534 - DNA, 68 bp, Artificial Sequence
  Synthetic
ggatttcattgcactgatgggcggtactggcgcgacctacaaagtgctaaaccatacatgttaaaaat

SEQ ID NO: 535 - DNA, 68 bp, Artificial Sequence
  Synthetic
tatatgtcttcatataatcgagcaatgtgttcagatcatccagctcatagtattttgtctctttcttt

SEQ ID NO: 536 - DNA, 68 bp, Artificial Sequence
  Synthetic
gcgcgccgactttatgcaggatcacattgctgggcacacgataacgtgccgttcgtaaaccgacgagc

SEQ ID NO: 537 - DNA, 69 bp, Artificial Sequence
  Synthetic
ttcgttaattggagctacggccattggtggacctcctgaccggattaattaatatcactaggaaatggc

SEQ ID NO: 538 - DNA, 68 bp, Artificial Sequence
  Synthetic
taatgcatacattgtcgttgtcttcccagaaccagtagctaacgttatataaatacacttaaaataaa

SEQ ID NO: 539 - DNA, 68 bp, Artificial Sequence
  Synthetic
gctctgcaaaagcttgatcgtcggttcaaatccgtctaccgcctttattataggattttgtccgaatt

SEQ ID NO: 540 - DNA, 68 bp, Artificial Sequence
  Synthetic
acaatcatcagataactatggcggcacgtgcattaatgtataatgtgtgtacttccatatatttatac

SEQ ID NO: 541 - DNA, 68 bp, Artificial Sequence
  Synthetic
atgtacgagtactttagacgggatacaaccgtggttgctcaattgtgtatacttccatactaaattaa

SEQ ID NO: 542 - DNA, 69 bp, Artificial Sequence
  Synthetic
atgaagattataataattggaggtggctggtctggatgtgcagcacaggtaaaactacactaattatta

SEQ ID NO: 543 - DNA, 68 bp, Artificial Sequence
  Synthetic
aaccccaaagtcggcttcgtcagccttggctgcccgaaggatggttgagatatacttttggcgagcag

SEQ ID NO: 544 - DNA, 69 bp, Artificial Sequence
  Synthetic
gaatctaaattttctttcggtaatccttcttcactactaagtgttatattaacccaaaaaagagccttc

SEQ ID NO: 545 - DNA, 69 bp, Artificial Sequence
  Synthetic
ctggcttgattaatagtttaaaagtcttggctggtgttattgctgtgaataaagttgttggtgtaacca

SEQ ID NO: 546 - DNA, 68 bp, Artificial Sequence; identical to SEQ ID NO: 490
  Synthetic

SEQ ID NO: 547 - DNA, 68 bp, Artificial Sequence; identical to SEQ ID NO: 502
  Synthetic

SEQ ID NO: 548 - DNA, 68 bp, Artificial Sequence
  Synthetic
cactcccaaagtcggcttcgtcagtcttggatgccccaacgaatagaaaagtaaaccagttttcagcg

SEQ ID NO: 549 - DNA, 68 bp, Artificial Sequence; identical to SEQ ID NO: 520
  Synthetic

SEQ ID NO: 550 - DNA, 68 bp, Artificial Sequence
  Synthetic
agctttcattgcgcgacggatgggctataggtacacatcactatatttgacaaaaagtctataaataa

SEQ ID NO: 551 - DNA, 69 bp, Artificial Sequence
  Synthetic
cgcatgttcgcggccggcacgctggtcacgctcggcaacccgaacgttagccaatatacaaaccatgct

SEQ ID NO: 552 - DNA, 69 bp, Artificial Sequence; identical to SEQ ID NO: 551
  Synthetic

SEQ ID NO: 553 - DNA, 69 bp, Artificial Sequence
  Synthetic
gggtggaaataatataaaaggtggccttataggtcctccaataagatacaagaacacaacggcttaaaa

SEQ ID NO: 554 - DNA, 68 bp, Artificial Sequence
  Synthetic
ttttcccccgaaaatctttaacaccactatctgttgatattcactccattaactaccaaaataaaaaa

SEQ ID NO: 555 - DNA, 69 bp, Artificial Sequence; identical to SEQ ID NO: 452
  Synthetic

SEQ ID NO: 556 - DNA, 68 bp, Artificial Sequence
  Synthetic
atcttttaactgcaaaagtactacggtctctacatgggacgagttgatagaattgatgtatttgcgat

SEQ ID NO: 557 - DNA, 68 bp, Artificial Sequence
  Synthetic
taagggcatggacatgtttcctcatacacctcatgtggagacggtggtattgatgtcaagggcggaga

SEQ ID NO: 558 - DNA, 69 bp, Artificial Sequence; identical to SEQ ID NO: 407
  Synthetic

SEQ ID NO: 559 - DNA, 69 bp, Artificial Sequence
  Synthetic
ataatcatcaaagagtttaggattatcaaattcactagtaaatgttatattaacccaaaaaaaagagtc

SEQ ID NO: 560 - DNA, 69 bp, Artificial Sequence
  Synthetic
accagctgtaactttttcggatcaagctatgagggacggagaataaatgagaaactaaaatacaaataa

SEQ ID NO: 561 - DNA, 68 bp, Artificial Sequence; identical to SEQ ID NO: 469
  Synthetic

SEQ ID NO: 562 - DNA, 69 bp, Artificial Sequence
  Synthetic
agggcctggctgctgaactcgggcgtctcgtcgaggaacgagacgtataaaacaagtggctacggccag

SEQ ID NO: 563 - DNA, 68 bp, Artificial Sequence
  Synthetic
acaatcaacaaagatgtatggtggtacatgcattaatatttaatgtgtatacttccgtattttttata

SEQ ID NO: 564 - DNA, 68 bp, Artificial Sequence
  Synthetic
atggctgttgcgttgatagcgccaagcgttactagtaggacatttcctaaaagtggctaattttttgt

SEQ ID NO: 565 - DNA, 69 bp, Artificial Sequence
  Synthetic
tatcttttaactgcaagagtactacggtttccacgtgcgttgactgtctacttagtatcttcctactat

SEQ ID NO: 566 - DNA, 68 bp, Artificial Sequence
  Synthetic
attaacaagcactttagatggaatacagccatggttggttaattgtgcatacttccataaaatattaa

SEQ ID NO: 567 - DNA, 69 bp, Artificial Sequence
  Synthetic
gaccacaatccgcgtgtgggctttgtatcccttgggtgcccgagtgatgcttaaaatacactcggtgct

SEQ ID NO: 568 - DNA, 68 bp, Artificial Sequence
  Synthetic
ttcgacgaatgatgctttagggctgaatggagtaaatctaattacaccaacaaggtgacaacaaagca

SEQ ID NO: 569 - DNA, 68 bp, Artificial Sequence
  Synthetic
caaaaattgcagtgcgttcagcgatgacaggacatttggtcattataatagacctatacacataaaca

SEQ ID NO: 570 - DNA, 68 bp, Artificial Sequence
  Synthetic
aattttcttgtcgattggctattcgacttgtcattggtgtcatgttttcttaagcctcaaaataaaaa

SEQ ID NO: 571 - DNA, 68 bp, Artificial Sequence
  Synthetic
ttttaaaatgattaaaggcggcgttccaataagcgtacctatttcgcacccccaataaacaccccacc

SEQ ID NO: 572 - DNA, 68 bp, Artificial Sequence
  Synthetic
gggtgaggatgcgctcggaatcgacaagggccttcgggcaccccaatgaaacaaaccctatacttcta

SEQ ID NO: 573 - DNA, 68 bp, Artificial Sequence
  Synthetic
agcaacccccctgctgttgggcttaacgtgcttctctaaaagcgtatctaaaactctcattcaatagg

SEQ ID NO: 574 - DNA, 68 bp, Artificial Sequence; identical to SEQ ID NO: 488
  Synthetic

SEQ ID NO: 575 - DNA, 68 bp, Artificial Sequence
  Synthetic
ccagatcagtgcgcccccggcggtccagagcaggaagcaggcacgtacggttgtaaaaggaaatccta

SEQ ID NO: 576 - DNA, 69 bp, Artificial Sequence
  Synthetic
taacaccaattaagtgtttagttccctctttgcgtccaacgagagaaaacgagaaactaaacaatctaa

SEQ ID NO: 577 - DNA, 68 bp, Artificial Sequence; identical to SEQ ID NO: 524
  Synthetic

SEQ ID NO: 578 - DNA, 68 bp, Artificial Sequence
  Synthetic
gtgaatgatttggtttttaatatttaaaaaaagaactactaacttcacataaacccaaactttttaca

SEQ ID NO: 579 - DNA, 69 bp, Artificial Sequence
  Synthetic
gtggatcacctggtttttcgtgttcagatacaggcatgtaaagtttacataaaccctaaaaagatcgac

SEQ ID NO: 580 - DNA, 69 bp, Artificial Sequence
  Synthetic
actttttatattgcaaaaaataaatggcggacgaggtaacagcatagttattccgaacttccaattaat

SEQ ID NO: 581 - DNA, 69 bp, Artificial Sequence; identical to SEQ ID NO: 415
  Synthetic

SEQ ID NO: 582 - DNA, 68 bp, Artificial Sequence
  Synthetic
agataaaacactctccaggaaacccggggcggttcatacaattatttgttattgtgcatcattctggt

SEQ ID NO: 583 - DNA, 68 bp, Artificial Sequence
  Synthetic
atatgttcccgcaaacagctcacgttgagacggtagtattgatgtcaagggtagataagtaagagtgt

SEQ ID NO: 584 - DNA, 68 bp, Artificial Sequence; identical to SEQ ID NO: 583
  Synthetic

SEQ ID NO: 585 - DNA, 69 bp, Artificial Sequence; identical to SEQ ID NO: 450
  Synthetic

SEQ ID NO: 586 - DNA, 68 bp, Artificial Sequence
  Synthetic
tgttaaccacataaacataaatggtacaactaatgtctatcgtgtgacaaaactaacatacaaaaacc

SEQ ID NO: 587 - DNA, 68 bp, Artificial Sequence
  Synthetic
aaatgttcgttgcaactatggggggtaccggtgctacctaccctgtaacactactaccattaaaattt

SEQ ID NO: 588 - DNA, 68 bp, Artificial Sequence
  Synthetic
ataatgcaacatagtctccagtaccacctttatatgctcactacatgaaaaagcgataattttaagta

SEQ ID NO: 589 - DNA, 69 bp, Artificial Sequence
  Synthetic
accagctgtaactttttcggatcaagctatgagggacggagaataaatgagatactaatccataataat

SEQ ID NO: 590 - DNA, 69 bp, Artificial Sequence
  Synthetic
aaccagctgtaactttttcggatcaagctatgagggaagaagaagaaacgagataccaaaaaagaacat

SEQ ID NO: 591 - DNA, 68 bp, Artificial Sequence
  Synthetic
atgaattaatgttttagtaggtatacatccgatattaatcaggtgtctatacttccgtacatatgtta

SEQ ID NO: 592 - DNA, 68 bp, Artificial Sequence
  Synthetic
agctgcgcgcgcagtatttctcgaaggagcccatggatataggtgcatcaaaattaactaaaggaaaa

SEQ ID NO: 593 - DNA, 68 bp, Artificial Sequence
  Synthetic
tcatcactacttaatatatccataagagaaatttcattacatcatacatgttgtacacctactttaaa

SEQ ID NO: 594 - DNA, 69 bp, Artificial Sequence
  Synthetic
aaccagctgtaactttttcggttcaagctatgagggagggagaagaaacgggataccaaaaataaagac

SEQ ID NO: 595 - DNA, 69 bp, Artificial Sequence; identical to SEQ ID NO: 521
  Synthetic

SEQ ID NO: 596 - DNA, 68 bp, Artificial Sequence
  Synthetic
atgaaggacttgatttttagtattgagataaagacatgtaaacataacataaacacaaaaaatcttat

SEQ ID NO: 597 - DNA, 69 bp, Artificial Sequence
  Synthetic
tccccgtgtcggcggttcgattccgtccctgggcaccaaaattcagcgcccaactgttctcagttgggc

SEQ ID NO: 598 - DNA, 69 bp, Artificial Sequence; identical to SEQ ID NO: 597
  Synthetic

SEQ ID NO: 599 - DNA, 69 bp, Artificial Sequence
  Synthetic
aaccagctgtaactttttcggatcaagctatgagggagggagaagaaacgggataccaaaaataaagac

SEQ ID NO: 600 - DNA, 68 bp, Artificial Sequence; identical to SEQ ID NO: 502
  Synthetic

SEQ ID NO: 601 - DNA, 69 bp, Artificial Sequence
  Synthetic
gagttctctccataccatgcgaagcgtgaactccaggtcttgtctatgacataccctcactataaattt

SEQ ID NO: 602 - DNA, 69 bp, Artificial Sequence
  Synthetic
gaaagtttttctgaatcctcttcattcatttggcaaccgtatgtagaaataaagaagtattgagtagta

SEQ ID NO: 603 - DNA, 68 bp, Artificial Sequence
  Synthetic
agcctctgtgccaagtatatctaaaagacttatttcattacacactactctttatatgttattggtat

SEQ ID NO: 604 - DNA, 68 bp, Artificial Sequence
  Synthetic
aggcagatcacctgtaacccttcgattattcttggtggtggaatggcgacgaaataaaaacccaaaat

SEQ ID NO: 605 - DNA, 69 bp, Artificial Sequence; identical to SEQ ID NO: 442
  Synthetic

SEQ ID NO: 606 - DNA, 69 bp, Artificial Sequence; identical to SEQ ID NO: 451
  Synthetic

SEQ ID NO: 607 - DNA, 68 bp, Artificial Sequence
  Synthetic
gttaacaagcactttagacggaatacagccatggttggttgattgtgcatacttccataaaatattaa

SEQ ID NO: 608 - DNA, 68 bp, Artificial Sequence; identical to SEQ ID NO: 437
  Synthetic

SEQ ID NO: 609 - DNA, 68 bp, Artificial Sequence
  Synthetic
gtattattaggggtgtttgcaatcggggcaccaggagtacgaggtgtctttaaatagttatgaaatta

SEQ ID NO: 610 - DNA, 69 bp, Artificial Sequence
  Synthetic
gaagagcaccgagcgcaggaagagcgtgtactgctcccatgagcgttgcgcacaccctaatgttgcctc

SEQ ID NO: 611 - DNA, 69 bp, Artificial Sequence; identical to SEQ ID NO: 473
  Synthetic

SEQ ID NO: 612 - DNA, 69 bp, Artificial Sequence; identical to SEQ ID NO: 494
  Synthetic

SEQ ID NO: 613 - DNA, 69 bp, Artificial Sequence; identical to SEQ ID NO: 599
  Synthetic

SEQ ID NO: 614 - DNA, 68 bp, Artificial Sequence; identical to SEQ ID NO: 492
  Synthetic

SEQ ID NO: 615 - DNA, 69 bp, Artificial Sequence; identical to SEQ ID NO: 404
  Synthetic

SEQ ID NO: 616 - DNA, 69 bp, Artificial Sequence
  Synthetic
gtaacaccaattaagtgtttagttccctctttgcgtccagcgagagataacgaggtactaaataatcta

SEQ ID NO: 617 - DNA, 69 bp, Artificial Sequence; identical to SEQ ID NO: 396
  Synthetic

SEQ ID NO: 618 - DNA, 68 bp, Artificial Sequence; identical to SEQ ID NO: 604
  Synthetic

SEQ ID NO: 619 - DNA, 69 bp, Artificial Sequence
  Synthetic
agcaggatggagataacgagcatgacgactaacatttcaataaatatgggtaataacccttaaatgatt

SEQ ID NO: 620 - DNA, 69 bp, Artificial Sequence; identical to SEQ ID NO: 459
  Synthetic

SEQ ID NO: 621 - DNA, 68 bp, Artificial Sequence; identical to SEQ ID NO: 412
  Synthetic

SEQ ID NO: 622 - DNA, 68 bp, Artificial Sequence
  Synthetic
tttaaattttgtcctttcttcccgctatacccgcttcctcatatgtcaataaggataaaaatattatt

SEQ ID NO: 623 - DNA, 68 bp, Artificial Sequence
  Synthetic
atggctgttgcgttgatagcgccaagcgttactagtaggacagttcctaaaagtggctaattttttgt

SEQ ID NO: 624 - DNA, 68 bp, Artificial Sequence
  Synthetic
ccaaatattaaattctgcagtaggcgtccaatttccgaataacacaccaaaacccccacatatgccac

SEQ ID NO: 625 - DNA, 68 bp, Artificial Sequence; identical to SEQ ID NO: 397
  Synthetic

SEQ ID NO: 626 - DNA, 69 bp, Artificial Sequence
  Synthetic
tttgcgagactacggatctggatctcgtcccactgctggcagtgaactgtactcagacgcaaataagca

SEQ ID NO: 627 - DNA, 68 bp, Artificial Sequence
  Synthetic
agaaaagcacgctgataatcagcaagaccaccaacatttcaatcaaggatagtaaaactctcactctt

SEQ ID NO: 628 - DNA, 69 bp, Artificial Sequence
  Synthetic
acaccagaaatcaaggagtcttaccagtatggaaatgtaggttactaaaattatttatattttccactt

SEQ ID NO: 629 - DNA, 68 bp, Artificial Sequence
  Synthetic
atgtacgagtactttagagggtatacagccgtggttgcaagactgtacatacttccatagtttattaa

SEQ ID NO: 630 - DNA, 68 bp, Artificial Sequence
  Synthetic
aacaatctgcaaacatgtatggcggtacatgtatcaatatagaacgtttatagttccatacaaaaata

SEQ ID NO: 631 - DNA, 69 bp, Artificial Sequence
  Synthetic
tgtaacacttcatttttgacgttcagaaacagcacgaccaaccttacataaatggtaactattatatat

SEQ ID NO: 632 - DNA, 68 bp, Artificial Sequence
  Synthetic
gcttctggacgcgggttcgattcccgccgcctccaccaatatccgaaccctaaccgctctcggttggg

SEQ ID NO: 633 - DNA, 68 bp, Artificial Sequence; identical to SEQ ID NO: 632
  Synthetic

SEQ ID NO: 634 - DNA, 69 bp, Artificial Sequence
  Synthetic
gtaacaccaattaagtgtttagttccctctttgcgtccagagagagaaattgaggtactaaacaacgta

SEQ ID NO: 635 - DNA, 68 bp, Artificial Sequence
  Synthetic
accgtaaaataacatttctgtttttccagccccgcaagtagctagtcttgaataccgaaaaaaaattc

SEQ ID NO: 636 - DNA, 68 bp, Artificial Sequence
  Synthetic
gaatgatgcgttggggcttaatggagtaaatctaattacaccaacaaggtgacgacaaagcgcgaacg

SEQ ID NO: 637 - DNA, 69 bp, Artificial Sequence; identical to SEQ ID NO: 417
  Synthetic

SEQ ID NO: 638 - DNA, 69 bp, Artificial Sequence
  Synthetic
ttcggacgcgggttcaactcccgccagctccaccaaataaaacaaggggttacgtgaaaacgtagcccc

SEQ ID NO: 639 - DNA, 68 bp, Artificial Sequence
  Synthetic
aatttttaaaaaaagtcgacaagcatttactctaattgaaacggcttatagtcattatgtttattttg

SEQ ID NO: 640 - DNA, 68 bp, Artificial Sequence
  Synthetic
agagaagttgccggaagcatggttctagtttctttgggcaaaacctcttgaaatacataaaaagagtt

SEQ ID NO: 641 - DNA, 69 bp, Artificial Sequence
  Synthetic
cacctggcgtggcgaagtgcgcagtctggaagcactagtacgttggcagtcacctgaacgtgggttgat

SEQ ID NO: 642 - DNA, 68 bp, Artificial Sequence
  Synthetic
ataacgcatacattgttgttgtttttccagatccagtttttttagtaacataaatacaactccgaata

SEQ ID NO: 643 - DNA, 68 bp, Artificial Sequence
  Synthetic
tatgttcaggtttgatcattttccaaaaacgtatcatgtggagtgtgttgtcttgatgtcaagggtgg

SEQ ID NO: 644 - DNA, 68 bp, Artificial Sequence; identical to SEQ ID NO: 643
  Synthetic

SEQ ID NO: 645 - DNA, 69 bp, Artificial Sequence; identical to SEQ ID NO: 451
  Synthetic

SEQ ID NO: 646 - DNA, 69 bp, Artificial Sequence
  Synthetic
taacaccaattaagtgtttagttccctctttgcgtccaacgagagaaatcgaggtactaaacaagctaa

SEQ ID NO: 647 - DNA, 69 bp, Artificial Sequence; identical to SEQ ID NO: 616
  Synthetic

SEQ ID NO: 648 - DNA, 69 bp, Artificial Sequence
  Synthetic
gctggtggtggatatcggcggtggtacgactgactgttcgtagtcatgcaataatgtacaccgcagtaa

SEQ ID NO: 649 - DNA, 68 bp, Artificial Sequence
  Synthetic
tatgcaaccagtcgatatgttcccgcaaacagctcacatcgagtgtgtaggactgcttacacgtgtgg

SEQ ID NO: 650 - DNA, 69 bp, Artificial Sequence; identical to SEQ ID NO: 599
  Synthetic

SEQ ID NO: 651 - DNA, 69 bp, Artificial Sequence
  Synthetic
aaccagctgtaactttttcggatcaagttatgatggaagaagaagaaacgagaaactaaaattataaat

SEQ ID NO: 652 - DNA, 69 bp, Artificial Sequence
  Synthetic
taacaccaattaagtgtttagttccctctttgcgtccaacgagagataacgagatactaaacaatctaa

SEQ ID NO: 653 - DNA, 69 bp, Artificial Sequence
  Synthetic
ataatcatcaaagattttaggattatcaaattcactagtaaatgtattattaacccaaaaaaagagtct

SEQ ID NO: 654 - DNA, 68 bp, Artificial Sequence
  Synthetic
catctttactttgctcttttctcgaatttcagcatctgcggtatgcttatagggacaaaaattataaa

SEQ ID NO: 655 - DNA, 69 bp, Artificial Sequence
  Synthetic
ctgtttcaacaaatgatgctcttggccttaatggtgtaaacctaattacaccaacaaggtgacaacaaa

SEQ ID NO: 656 - DNA, 68 bp, Artificial Sequence
  Synthetic
agctaagtgtcctaattggcccccgatcccggtttcaattggaaatacctaatatacgaaaaaggtgt

SEQ ID NO: 657 - DNA, 68 bp, Artificial Sequence
  Synthetic
cggccttccacttacaaaaattccgcagacaattgaaactggttatacctaatatacgaaaatatgca

SEQ ID NO: 658 - DNA, 68 bp, Artificial Sequence
  Synthetic
gtagatgttttttgttgccattaggcgcatgaggttgttaccaacagggtgataacaaagctaatgaa

SEQ ID NO: 659 - DNA, 69 bp, Artificial Sequence
  Synthetic
aatatgttttgtcgccattaaacgcataaggtttacaccaacatgatgacaacgaagatatttactttt

SEQ ID NO: 660 - DNA, 69 bp, Artificial Sequence
  Synthetic
aatatgttttgtcgccattaaacgcataaggtttacaccaacttgatgacgacaaaaatatttattttt

SEQ ID NO: 661 - DNA, 69 bp, Artificial Sequence
  Synthetic
cgtcgttagtatcagctttcggaagggcgtatcatagaggaaatggaccattaacctaaaattaaagta

SEQ ID NO: 662 - DNA, 68 bp, Artificial Sequence
  Synthetic
gcgcgtgatattgcgacgtattttaatcatacattcggcacagcgagtttatctataagttgaagtaa

SEQ ID NO: 663 - DNA, 69 bp, Artificial Sequence
  Synthetic
gttttttgttgccattaggcgcatgaggttgacgccaacagggtgatgacaatataaacatttcttttt

SEQ ID NO: 664 - DNA, 69 bp, Artificial Sequence
  Synthetic
attgattctacaacagaagttggcatactagaaactagtatcttatttatcttaagctaaaattaaaat

SEQ ID NO: 665 - DNA, 68 bp, Artificial Sequence
  Synthetic
catctttactttgctcttctctcgaatttcagcatctgcggtatacttatagggacaaaaattataaa

SEQ ID NO: 666 - DNA, 69 bp, Artificial Sequence
  Synthetic
aaaattaacaagctaataatgaacaagacaatcgtcatttcaatagcactccccaaatctttttaatag

SEQ ID NO: 667 - DNA, 68 bp, Artificial Sequence
  Synthetic
tttgttgactcgttgtttctactgcatatgccgtactggataattccatttaacgcaaacaaaaaaac

SEQ ID NO: 668 - DNA, 69 bp, Artificial Sequence
  Synthetic
taacaccaattaagtgtttagttccctctttgcgtccaacgagagaaaacgaggtactaaataaactaa

SEQ ID NO: 669 - DNA, 69 bp, Artificial Sequence
  Synthetic
gtcttctggaccatgatgcgccacttccgaaatttcaaatacagaataatgttgcataaaatagccctg

SEQ ID NO: 670 - DNA, 69 bp, Artificial Sequence
  Synthetic
taacaccaattaagtgtttagttccctctttgcgtccagcgagagataacgaggtactaaataatctaa

SEQ ID NO: 671 - DNA, 68 bp, Artificial Sequence
  Synthetic
cgcgacaccagcctcgtcgtggtcccgcagttccacgtatgtgcgcgcaaagggggaaggaggcggcc

SEQ ID NO: 672 - DNA, 68 bp, Artificial Sequence
  Synthetic
gtgtcggcagccctgcaggtcggatatcgcagcatcgacacttcattggtaggacttggtagaacggt

SEQ ID NO: 673 - DNA, 69 bp, Artificial Sequence
  Synthetic
tccgcagcaatatcttcatacaaatcggcaataggatctccttttgcttttaaagacataacaaatagt

SEQ ID NO: 674 - DNA, 69 bp, Artificial Sequence; identical to SEQ ID NO: 565
  Synthetic

SEQ ID NO: 675 - DNA, 69 bp, Artificial Sequence; identical to SEQ ID NO: 491
  Synthetic

SEQ ID NO: 676 - DNA, 68 bp, Artificial Sequence; identical to SEQ ID NO: 397
  Synthetic

SEQ ID NO: 677 - DNA, 69 bp, Artificial Sequence; identical to SEQ ID NO: 491
  Synthetic

SEQ ID NO: 678 - DNA, 69 bp, Artificial Sequence
  Synthetic
tatgcaacccgtcgatatgttcccgcaaacagctcacatcgagtgtgtaggtctgcttactcgtgtaga

SEQ ID NO: 679 - DNA, 68 bp, Artificial Sequence
  Synthetic
tcgtttcaatatgtccgtacatggaataataaagcaccagtattcttgccttaacactcatggtattc

SEQ ID NO: 680 - DNA, 68 bp, Artificial Sequence
  Synthetic
cgaacatctataaattctgtattggtagaaacatcacaatcaaaatgctaataccacacactacaata

SEQ ID NO: 681 - DNA, 69 bp, Artificial Sequence
  Synthetic
atagtattagctggcggatgtgcaactggcacatggtggaactggactgaattaagtcaaaatataaac

SEQ ID NO: 682 - DNA, 68 bp, Artificial Sequence
  Synthetic
cgacaaggacaccacgctcgtcgtggtccctcaatttcacgtctgtgagcctaaaggggcatccccac

SEQ ID NO: 683 - DNA, 69 bp, Artificial Sequence; identical to SEQ ID NO: 420
  Synthetic

SEQ ID NO: 684 - DNA, 69 bp, Artificial Sequence
  Synthetic
ctgtgccgcccgagtgatctgcgtgcacaatcatcccagcggaaagtatcagttaggcacataaattag

SEQ ID NO: 685 - DNA, 68 bp, Artificial Sequence; identical to SEQ ID NO: 623
  Synthetic

SEQ ID NO: 686 - DNA, 68 bp, Artificial Sequence
  Synthetic
gaatgatgcgttggggcttaatggagtaaatctaattacaccaacaaggtgacgacaaagcacgaacg

SEQ ID NO: 687 - DNA, 69 bp, Artificial Sequence; identical to SEQ ID NO: 442
  Synthetic

SEQ ID NO: 688 - DNA, 69 bp, Artificial Sequence
  Synthetic
atagaaatagacctttccactggccaaggagctgataaaactattacaaatacacaagtatagaaatag

SEQ ID NO: 689 - DNA, 68 bp, Artificial Sequence
  Synthetic
ttgatatgatattttataacggttaatatatttataataaatatcctccggcatagccggaggttttt

SEQ ID NO: 690 - DNA, 68 bp, Artificial Sequence; identical to SEQ ID NO: 413
  Synthetic

SEQ ID NO: 691 - DNA, 68 bp, Artificial Sequence
  Synthetic
gatagtgatcgaatatattcatggtatgccgtcctttcgtatactatgggaacattttgatttaatac

SEQ ID NO: 692 - DNA, 68 bp, Artificial Sequence
  Synthetic
cccgaaggatgctccccgctccaccaccgtttatgaaactttcatgccacgctggatacaaacgcgcg

SEQ ID NO: 693 - DNA, 68 bp, Artificial Sequence
  Synthetic
aatgtttatcgttacttttggaggtacgggtgcaacctacctcgtaacacaccattcatcaaaatcta

SEQ ID NO: 694 - DNA, 68 bp, Artificial Sequence
  Synthetic
taactcacgacacgttgtgctcttaccaaccgcacttgcagtatgtcaatatggcaaaaagctattct

SEQ ID NO: 695 - DNA, 68 bp, Artificial Sequence
  Synthetic
acaatcatcagataactatggcggcacgtgcattaatgtttagtgtgtatacttccataaaaattaac

SEQ ID NO: 696 - DNA, 68 bp, Artificial Sequence; identical to SEQ ID NO: 649
  Synthetic

SEQ ID NO: 697 - DNA, 68 bp, Artificial Sequence
  Synthetic
gcaaccggcatcaatgtaataccgataatcgtaacaagcaaccttaatcgggtactacttaatatcta

SEQ ID NO: 698 - DNA, 69 bp, Artificial Sequence
  Synthetic
aagaacactaataatcagcaaaacaactagcatttcaatcaaggatagtgaaattattgctttttcgaa

SEQ ID NO: 699 - DNA, 69 bp, Artificial Sequence
  Synthetic
gagagagtagagtgttgttgtcttgccagacccagttggtagcgttacgtaaatataactaattattta

SEQ ID NO: 700 - DNA, 68 bp, Artificial Sequence
  Synthetic
cttgtaaaacaagggctttccggggtattgggtggtggtggggtcgcacccttgtatgaaactgacct

SEQ ID NO: 701 - DNA, 68 bp, Artificial Sequence; identical to SEQ ID NO: 700
  Synthetic

SEQ ID NO: 702 - DNA, 68 bp, Artificial Sequence; identical to SEQ ID NO: 548
  Synthetic

SEQ ID NO: 703 - DNA, 68 bp, Artificial Sequence
  Synthetic
cactcccaaagtcggcttcgtcagtcttggatgccccaacgaatagaaaagtaaaccagctttcagcg

SEQ ID NO: 704 - DNA, 69 bp, Artificial Sequence
  Synthetic
atgatctgctccgaatcgacgagtgccttggggcacccaagcgacaccattcctatactatacggcttc

SEQ ID NO: 705 - DNA, 69 bp, Artificial Sequence; identical to SEQ ID NO: 440
  Synthetic

SEQ ID NO: 706 - DNA, 68 bp, Artificial Sequence
  Synthetic
aaagctaaggttaaagcttttacattgattgaaatgtaggttactaaaattatttatattttccaatt

SEQ ID NO: 707 - DNA, 69 bp, Artificial Sequence
  Synthetic
tagatacacctgcaatttgttgtaatggcacttatttgagtgtgtgacgcttattacaacattttcacc

SEQ ID NO: 708 - DNA, 69 bp, Artificial Sequence
  Synthetic
tcgtacgccggggagacgacgttcgccgcgatgttgaccgacagacacggcaaaacacgcagcgcctat

SEQ ID NO: 709 - DNA, 68 bp, Artificial Sequence
  Synthetic
ggatttcgttgcactgatgggcggtactggcgcgacctacaatgtgctaaaccatacatgttaaaaat

SEQ ID NO: 710 - DNA, 68 bp, Artificial Sequence
  Synthetic
agtacaaccagtcgatttattcccacaaacacatcacatcgagtgtgtaggactgcttacacgtgtgg

SEQ ID NO: 711 - DNA, 68 bp, Artificial Sequence; identical to SEQ ID NO: 710
  Synthetic

SEQ ID NO: 712 - DNA, 69 bp, Artificial Sequence
  Synthetic
acataaaaatatagattttccagggcataatcatgcatggtttatagtattgcaaccattctaccaaat

SEQ ID NO: 713 - DNA, 69 bp, Artificial Sequence; identical to SEQ ID NO: 440
  Synthetic

SEQ ID NO: 714 - DNA, 68 bp, Artificial Sequence
  Synthetic
ggttaagtgtatggatatgttcccaaatacgccacacgttgagagcgtagtattgttgactaaagcac

SEQ ID NO: 715 - DNA, 68 bp, Artificial Sequence; identical to SEQ ID NO: 714
  Synthetic

SEQ ID NO: 716 - DNA, 68 bp, Artificial Sequence
  Synthetic
aaagcgaatggcaagctcaggccactcggcattccgacggtgacttcataatgcacctctcacagttg

SEQ ID NO: 717 - DNA, 68 bp, Artificial Sequence
  Synthetic
taagaagaaagactctttttttatttgggctgtgtgaatagcccgaaatgaatacataaaaagataac

SEQ ID NO: 718 - DNA, 69 bp, Artificial Sequence
  Synthetic
gactgcgcctctaaagatttcccttggatgagctaccgacatagctatatcaaccctcaataaatttat

SEQ ID NO: 719 - DNA, 68 bp, Artificial Sequence
  Synthetic
tcacacaattgaccaactattagtaactcacgcagaagtgtgagttctgaaattgatacaatacaact

SEQ ID NO: 720 - DNA, 68 bp, Artificial Sequence; identical to SEQ ID NO: 719
  Synthetic

SEQ ID NO: 721 - DNA, 68 bp, Artificial Sequence; identical to SEQ ID NO: 488
  Synthetic

SEQ ID NO: 722 - DNA, 68 bp, Artificial Sequence; identical to SEQ ID NO: 488
  Synthetic

SEQ ID NO: 723 - DNA, 68 bp, Artificial Sequence; identical to SEQ ID NO: 488
  Synthetic

SEQ ID NO: 724 - DNA, 69 bp, Artificial Sequence; identical to SEQ ID NO: 467
  Synthetic

SEQ ID NO: 725 - DNA, 69 bp, Artificial Sequence
  Synthetic
acctccgcgcggtcgcgccgcgtgcggtcgttcacccacgtcagtggatctaaaggaccacatcggagc

SEQ ID NO: 726 - DNA, 68 bp, Artificial Sequence
  Synthetic
acaatcaacaaagatgtatggtggtacatgcattaatatttaatgtgtatacttccgtaaaaataacc

SEQ ID NO: 727 - DNA, 68 bp, Artificial Sequence
  Synthetic
aaaatatttagttttctttggaggagctgggacatcaactgaaattacttctataaactaccaaaata

SEQ ID NO: 728 - DNA, 68 bp, Artificial Sequence
  Synthetic
aacagttcctttttcaatgttactgtatcctgatgtgtactttacaaaaacactattttatataaata

SEQ ID NO: 729 - DNA, 69 bp, Artificial Sequence; identical to SEQ ID NO: 594
  Synthetic

SEQ ID NO: 730 - DNA, 68 bp, Artificial Sequence
  Synthetic
aagtgtaatatgtttgggtatggggaagtgaatcagtttaatactccaccatgtacacgaagtgaaaa

SEQ ID NO: 731 - DNA, 68 bp, Artificial Sequence
  Synthetic
aatgagctaaaagctgtggcccagtcatcaattgaccaaacactatataactacaataaaagagcaca

SEQ ID NO: 732 - DNA, 68 bp, Artificial Sequence
  Synthetic
acaatcaacaaagatgtatggcggtacatgcattaatatttaatgtgtatacttccgtatttttatag

SEQ ID NO: 733 - DNA, 68 bp, Artificial Sequence
  Synthetic
acaatcgtcagataattttggcggtacatgcataaatgttgagtgaacaaacttccataataaaataa

SEQ ID NO: 734 - DNA, 69 bp, Artificial Sequence; identical to SEQ ID NO: 491
  Synthetic

SEQ ID NO: 735 - DNA, 68 bp, Artificial Sequence
  Synthetic
accgtaaaatagcatttcagtttttccagccccgcaagtagctggtcttgaataccgaaaaaaattca

SEQ ID NO: 736 - DNA, 69 bp, Artificial Sequence
  Synthetic
agcaacgccagatagaacagcatgatcttcgggttgccgagcgttagccaatatacatattaacagggc

SEQ ID NO: 737 - DNA, 68 bp, Artificial Sequence
  Synthetic
agctttcattgcgcgacggatgggctataggtacacatcaccatatttgacaaaaaacctataaataa

SEQ ID NO: 738 - DNA, 69 bp, Artificial Sequence
  Synthetic
ataatcatcaaagattttaggattatcaaattcactagtaaatgttttattaacccaaaaaaagagtct

SEQ ID NO: 739 - DNA, 69 bp, Artificial Sequence
  Synthetic
ataatcatcaaagattttcggattatcaaattcactagtaaatgtttaattaacccaaaaaaagagtct

SEQ ID NO: 740 - DNA, 68 bp, Artificial Sequence
  Synthetic
atcttttaactgcaaaagtactacggtctctacatgcgttgagagtacactctgtatcttcctactat

SEQ ID NO: 741 - DNA, 68 bp, Artificial Sequence; identical to SEQ ID NO: 740
  Synthetic

SEQ ID NO: 742 - DNA, 68 bp, Artificial Sequence
  Synthetic
atgaattaatgttttagtaggtatacatccgatattaatcaggtgtctatacttccgtacatacgtta

SEQ ID NO: 743 - DNA, 68 bp, Artificial Sequence
  Synthetic
atgtacgagtactttagacgggatacaaccgtggttgctcaattgtgcatacttccatactaaattaa

SEQ ID NO: 744 - DNA, 68 bp, Artificial Sequence
  Synthetic
atttaacatcaatgaacctgaacccatggttggatctatgttcctactgattttgatacaaaagaaaa

SEQ ID NO: 745 - DNA, 68 bp, Artificial Sequence; identical to SEQ ID NO: 744
  Synthetic

SEQ ID NO: 746 - DNA, 69 bp, Artificial Sequence
  Synthetic
atttatttcgttccgtgttaggtaatattacgagtagagtcaatgttcctttaacccaaaaattaaagg

SEQ ID NO: 747 - DNA, 68 bp, Artificial Sequence; identical to SEQ ID NO: 490
  Synthetic

SEQ ID NO: 748 - DNA, 68 bp, Artificial Sequence
  Synthetic
cactcccaaagtcggcttcgtcagtcttggatgccccaatgactgcaaaagtaaactcaatctttaag

SEQ ID NO: 749 - DNA, 68 bp, Artificial Sequence
  Synthetic
ccatcataagatgcctttttaccgacaagtatagttgtacatgaaaaacgctgtatttttttatccat

SEQ ID NO: 750 - DNA, 68 bp, Artificial Sequence; identical to SEQ ID NO: 488
  Synthetic

SEQ ID NO: 751 - DNA, 68 bp, Artificial Sequence; identical to SEQ ID NO: 488
  Synthetic

SEQ ID NO: 752 - DNA, 68 bp, Artificial Sequence
  Synthetic
ctgagtgggcgaactatttatcttttacaatgccaatcccatgtataattaggggataaaaataaaaa

SEQ ID NO: 753 - DNA, 69 bp, Artificial Sequence
  Synthetic
gaaactatggggattatagcgtttgagggagcaagtgcggtgtataattaaggcataaaataaaaactg

SEQ ID NO: 754 - DNA, 69 bp, Artificial Sequence
  Synthetic
gaagggaataatagctctgttttgcctgctccacaaacaaccaatcatgaatactaaaattatcataaa

SEQ ID NO: 755 - DNA, 69 bp, Artificial Sequence
  Synthetic
gaccacaatccgcgtgtgggctttgtatcccttgggtgcccgtaggatagcaaaagtatactcatcgct

SEQ ID NO: 756 - DNA, 69 bp, Artificial Sequence
  Synthetic
gcgaacgccactgcggccccatcagcagcaatgaacagttatgttatgatgtacaccacagttaatgga

SEQ ID NO: 757 - DNA, 69 bp, Artificial Sequence
  Synthetic
gcgaacgccactgcggtcccatcagcagcaatgaacagttatgttatgatgtacaccacagttaatgga

SEQ ID NO: 758 - DNA, 68 bp, Artificial Sequence
  Synthetic
gctgccgatcaccgagatcgcgttcgcgtccggctttccgagtgcgcgtgaactacagttctagcatg

SEQ ID NO: 759 - DNA, 69 bp, Artificial Sequence; identical to SEQ ID NO: 461
  Synthetic

SEQ ID NO: 760 - DNA, 69 bp, Artificial Sequence; identical to SEQ ID NO: 461
  Synthetic

SEQ ID NO: 761 - DNA, 68 bp, Artificial Sequence; identical to SEQ ID NO: 502
  Synthetic

SEQ ID NO: 762 - DNA, 68 bp, Artificial Sequence; identical to SEQ ID NO: 502
  Synthetic

SEQ ID NO: 763 - DNA, 69 bp, Artificial Sequence
  Synthetic
gtcttctggaccatgatgcgctacttccgaaatttcaaatacagaataatgttgcatataatatcacta

SEQ ID NO: 764 - DNA, 68 bp, Artificial Sequence
  Synthetic
gtggatcacctggtttttcgtgttcagatacaggcatgtaaagtttacataaaccctaaaaagatcga

SEQ ID NO: 765 - DNA, 69 bp, Artificial Sequence
  Synthetic
taacaccaattaaatgtttagttccctctttgcgtccaacgagagaaaacgaggaactaaacaatctaa

SEQ ID NO: 766 - DNA, 69 bp, Artificial Sequence; identical to SEQ ID NO: 415
  Synthetic

SEQ ID NO: 767 - DNA, 69 bp, Artificial Sequence
  Synthetic
taacaccaattaagtgtttagttccctctttgcgtccaacgagaggaaacgaggaactaaacaatctaa

SEQ ID NO: 768 - DNA, 69 bp, Artificial Sequence; identical to SEQ ID NO: 499
  Synthetic

SEQ ID NO: 769 - DNA, 68 bp, Artificial Sequence
  Synthetic
tacaaagtagatgtcttttgtagccattaggcgcattaggttgacgccaacagggtgatgacaatata

SEQ ID NO: 770 - DNA, 69 bp, Artificial Sequence
  Synthetic
tacccgttgcttcgttgtagcaacactacgcactccacgtgtggtgataggtcttacccatattatgga

SEQ ID NO: 771 - DNA, 69 bp, Artificial Sequence; identical to SEQ ID NO: 770
  Synthetic

SEQ ID NO: 772 - DNA, 69 bp, Artificial Sequence
  Synthetic
tatcttttaactgcaagagtactacagtttccacgtgcattgactgtctacttagtatcttcctactat

SEQ ID NO: 773 - DNA, 69 bp, Artificial Sequence; identical to SEQ ID NO: 565
  Synthetic

SEQ ID NO: 774 - DNA, 69 bp, Artificial Sequence; identical to SEQ ID NO: 452
  Synthetic

SEQ ID NO: 775 - DNA, 69 bp, Artificial Sequence
  Synthetic
tatgcaacccgtcgatatgttcccgcaaacagctcacatcgagtgtataggtctgctcactcgccaaga

SEQ ID NO: 776 - DNA, 69 bp, Artificial Sequence; identical to SEQ ID NO: 775
  Synthetic

SEQ ID NO: 777 - DNA, 68 bp, Artificial Sequence
  Synthetic
tcccttaggtgctaatagcgccactaattccacatgcgttgagagtacactctgtatcttcctactat

SEQ ID NO: 778 - DNA, 68 bp, Artificial Sequence; identical to SEQ ID NO: 777
  Synthetic

SEQ ID NO: 779 - DNA, 68 bp, Artificial Sequence
  Synthetic
tcggggcacggtattggtgattcacgagaacaagggactgtaggttgatctaggacacctaaccaata

SEQ ID NO: 780 - DNA, 68 bp, Artificial Sequence
  Synthetic
ttattctctaataagtttaactacagtctcacaatggctcggttctccaatgaccaacctattcaaca

SEQ ID NO: 781 - DNA, 68 bp, Artificial Sequence; identical to SEQ ID NO: 780
  Synthetic

SEQ ID NO: 782 - DNA, 68 bp, Artificial Sequence
  Synthetic
tttaaattttgtcctttcttcccgctatacccacttcctcatatgtcaataaggataaaaatattatt

SEQ ID NO: 783 - DNA, 69 bp, Artificial Sequence
  Synthetic
taacaccaattaaatgtttagttccctctttgcgtccaacgagagaaatcgaggtactaaacaagctaa

SEQ ID NO: 784 - DNA, 68 bp, Artificial Sequence; identical to SEQ ID NO: 540
  Synthetic

SEQ ID NO: 785 - DNA, 68 bp, Artificial Sequence
  Synthetic
aatgtttgtaaaggagactgataatggcatgtacaactatactagttgtagtgcctaaataatgcttt

SEQ ID NO: 786 - DNA, 69 bp, Artificial Sequence; identical to SEQ ID NO: 442
  Synthetic

SEQ ID NO: 787 - DNA, 68 bp, Artificial Sequence; identical to SEQ ID NO: 622
  Synthetic

SEQ ID NO: 788 - DNA, 67 bp, Artificial Sequence
  Synthetic
cagtttttattttatgccttaattatacaccgcacttgctccctcaaacgctataatccccatagtt

SEQ ID NO: 789 - DNA, 66 bp, Artificial Sequence
  Synthetic
agttttatttttgtctgtataggctgtccgcatctgcatggcgcataacatatttatgcgctacag

SEQ ID NO: 790 - DNA, 66 bp, Artificial Sequence
  Synthetic
taacatatgtacggaagtatagacactcgattaatatcggatgtataccgactaaaacattaattc

SEQ ID NO: 791 - DNA, 66 bp, Artificial Sequence
  Synthetic
tcaacttttaaccctgttttaagacccagtattaagatgcgtgagggacaagattaccagactcag

SEQ ID NO: 792 - DNA, 66 bp, Artificial Sequence
  Synthetic
ttgtatattgctaacaaaagtttagcctcatctccaccaaaatatcaatatccaagtctttgaatt

SEQ ID NO: 793 - DNA, 66 bp, Artificial Sequence
  Synthetic
tatcccctcctctcaaaacatgtagagactgtagtacttttgcagttaaaagataaataaaggact

SEQ ID NO: 794 - DNA, 67 bp, Artificial Sequence
  Synthetic
tttgcaattgctggtggttctggtgcttggccttgggtacttgcttctcagctactttccctctttt

SEQ ID NO: 795 - DNA, 67 bp, Artificial Sequence
  Synthetic
tgtatcttgatgtacaacattgctctttattttcaaaaagatcagtggtcaaacggctcattaattt

SEQ ID NO: 796 - DNA, 67 bp, Artificial Sequence
  Synthetic
ctatttattagatgtctaaacagtgcattactactttaattccttgggcgcttattcctgccgctgc

SEQ ID NO: 797 - DNA, 66 bp, Artificial Sequence
  Synthetic
aatatagttgtataaaaagtcctttgccagatggcgaaggttatgatatttgtaaagaaataagaa

SEQ ID NO: 798 - DNA, 67 bp, Artificial Sequence
  Synthetic
cataatatgggtaagacctatcaccacatgtggagacggtagcacttttgtccaaacttgatgtcga

SEQ ID NO: 799 - DNA, 67 bp, Artificial Sequence
  Synthetic
tccattaactgtggtgcacatcataacataactgttcattgctgctgatggggccgcagtggcgttc

SEQ ID NO: 800 - DNA, 67 bp, Artificial Sequence
  Synthetic
ggtgaaaatgttgtaataagcgtcacacactcaaataagtgccattacaacaaattgcaggtgtatc

SEQ ID NO: 801 - DNA, 66 bp, Artificial Sequence
  Synthetic
tacataatttcgtatattagatattaccagtttcaatagtttggggaatctttgtaagtgggagac

SEQ ID NO: 802 - DNA, 66 bp, Artificial Sequence
  Synthetic
aattaaactaagatatttagatacgctactcgagacagtcgtcaagatattacaggttcatttaca

SEQ ID NO: 803 - DNA, 66 bp, Artificial Sequence
  Synthetic
gaagtatagggtttatttcattggggtgcccgaaggcccttgttgattccgagcgcatcctcaccc

SEQ ID NO: 804 - DNA, 66 bp, Artificial Sequence
  Synthetic
aaaaatttagttggttattggttactgtaacaaacgataccaatcccccaacctccaagtggatat

SEQ ID NO: 805 - DNA, 66 bp, Artificial Sequence
  Synthetic
atggataaaaaaatacagcgtttttcatgtacaactatactcgtcggtaaaaaggcatcttatgat

SEQ ID NO: 806 - DNA, 67 bp, Artificial Sequence
  Synthetic
cgcaggttcgaatcctgcagggcgcgccatttcttcctcatttatgcccgtcttatccgtttccgct

SEQ ID NO: 807 - DNA, 67 bp, Artificial Sequence
  Synthetic
atttataattttagtttctcgtttcttcttcttccctcatagcttgatccgaaaaagttacagctgg

SEQ ID NO: 808 - DNA, 66 bp, Artificial Sequence
  Synthetic
aataatatttttatccttattgacatatgaggaagcgggtatagcgggaagaaaggacaaaattta

SEQ ID NO: 809 - DNA, 67 bp, Artificial Sequence
  Synthetic
gaataactttttgccgtattgacataccgcaagtgcggttggtaagagtagcacgtgtcgtgaatta

SEQ ID NO: 810 - DNA, 66 bp, Artificial Sequence
  Synthetic
tattggttaggtgtcctagatcaacctacagtcccttgttctcgtgaatcaccaataccgtgcccc

SEQ ID NO: 811 - DNA, 67 bp, Artificial Sequence
  Synthetic
cttcttatttaaactaagatatttagatacattgcttgaaagcttattaacgctatcagtaacaagt

SEQ ID NO: 812 - DNA, 67 bp, Artificial Sequence
  Synthetic
tttttacaaagaggtatttagatacatgagctacattagcagttaaccgccgttttaaatcgcaaaa

SEQ ID NO: 813 - DNA, 66 bp, Artificial Sequence
  Synthetic
acataaatatatggaagtatacacactatacatttatgcatgtaccgccatagctttctgtaaact

SEQ ID NO: 814 - DNA, 67 bp, Artificial Sequence
  Synthetic
tttagatttttcgtatttacgataactttacatgtttatatttaaatacaaaaaatcaagttatata

SEQ ID NO: 815 - DNA, 66 bp, Artificial Sequence
  Synthetic
ttttcacttcgtgtacatggtggagtattaaactgattcacttccccatacccaaacatattacac

SEQ ID NO: 816 - DNA, 66 bp, Artificial Sequence
  Synthetic
tctgaatatcaataattttagtaaccttgattgagagccttattgtattatcagtagtggcattta

SEQ ID NO: 817 - DNA, 66 bp, Artificial Sequence
  Synthetic
agatgctctcccagctgagctaaactccctagagctaagcgacttccctatctcacagggggcaac

SEQ ID NO: 818 - DNA, 66 bp, Artificial Sequence
  Synthetic
tgtgctcttttattgtagttatatagtgtttggtcaattgatgactgggccacagcttttagctca

SEQ ID NO: 819 - DNA, 67 bp, Artificial Sequence
  Synthetic
aatcccctgccgcttcaagtagatgtctgcaggggacaccagatacccttcaaacgaaatctacctt

SEQ ID NO: 820 - DNA, 67 bp, Artificial Sequence
  Synthetic
taatgatttttaatgtttcacgttcagcttttttatactaacttgagcgaaacgggaaggtaaaaag

SEQ ID NO: 821 - DNA, 66 bp, Artificial Sequence
  Synthetic
gatttatgctttgtcgtcaccttgttggtgtaattagatttaccccatttaatcctaaagcatcat

SEQ ID NO: 822 - DNA, 66 bp, Artificial Sequence
  Synthetic
cgtttatgcattgttgtcaccttgttggtgtaattagatttaccccatttaatcctaatgcatcat

SEQ ID NO: 823 - DNA, 66 bp, Artificial Sequence
  Synthetic
tttttttacgtgaatgttttgtaacaactacagtagaagtggtaccattcatgtccttacgagata

SEQ ID NO: 824 - DNA, 67 bp, Artificial Sequence
  Synthetic
ggtttataatttttgtccctataagcataccgcagatgctgaaattcgagaaaagagcaaagtaaag

SEQ ID NO: 825 - DNA, 67 bp, Artificial Sequence
  Synthetic
agttttatttttgtctatattggctgtcggcatctgcgtgtctcataacgtatttatgcgctacagc

SEQ ID NO: 826 - DNA, 67 bp, Artificial Sequence
  Synthetic
gtggaaaatataaagaattttactatcctacatttcattgaatgtcattctctcacctttatcaacc

SEQ ID NO: 827 - DNA, 66 bp, Artificial Sequence
  Synthetic
cctattgaatgagagttttagatacgcttttagaatgtttggtagcattggttacaatcacaggag

SEQ ID NO: 828 - DNA, 66 bp, Artificial Sequence
  Synthetic
aaaccatcaacaattttcctctgagtgtcatttaggctgtgtcccttaattacgtaagcgttgata

SEQ ID NO: 829 - DNA, 66 bp, Artificial Sequence
  Synthetic
tcttttgtcatcaccctgttggcgtcaacctaatgcgcctaatggctacaaaagacatctacttcg

SEQ ID NO: 830 - DNA, 66 bp, Artificial Sequence
  Synthetic
ttttcttttgtatcaaaatcagtaggaacatagatccaaccatgggttcaggttcattgatgttaa

SEQ ID NO: 831 - DNA, 67 bp, Artificial Sequence
  Synthetic
cagggttactttatacaacattaatctgtatttgaaatttcagaagtggcgcatcatggtccagaag

SEQ ID NO: 832 - DNA, 67 bp, Artificial Sequence; identical to SEQ ID NO: 795
  Synthetic

SEQ ID NO: 833 - DNA, 67 bp, Artificial Sequence; identical to SEQ ID NO: 795
  Synthetic

SEQ ID NO: 834 - DNA, 67 bp, Artificial Sequence; identical to SEQ ID NO: 795
  Synthetic

SEQ ID NO: 835 - DNA, 67 bp, Artificial Sequence
  Synthetic
tgtatcttgatgtacaacattactctttattttcaaaaagatcagtggtcaaacggctcattaattt

SEQ ID NO: 836 - DNA, 66 bp, Artificial Sequence
  Synthetic
tgatataagtacggaagtatagacactcgattaatatcggatgtataccgactaaaacattaattc

SEQ ID NO: 837 - DNA, 66 bp, Artificial Sequence
  Synthetic
ctataaaaatacggaagtatacacattaaatattaatgcatgtaccgccatacatctttgttgatt

SEQ ID NO: 838 - DNA, 66 bp, Artificial Sequence
  Synthetic
taacatatgtacggaagtatagacacttgattaatatcggatgtatacctactaaaacattaattc

SEQ ID NO: 839 - DNA, 67 bp, Artificial Sequence
  Synthetic
aaatacatattctcttgttgtcatcatgttggtgtaaaccttatgcgtttaatggcgacaaaacata

SEQ ID NO: 840 - DNA, 67 bp, Artificial Sequence
  Synthetic
ataatataaaatactgttgttctatatggattggagttgcatgcactcaccctcctatgctaagtgt

SEQ ID NO: 841 - DNA, 67 bp, Artificial Sequence
  Synthetic
agcagggcgatcctgagtttaatctggctcgcctccaccattcaaatgagcaagtcgtaaaaacata

SEQ ID NO: 842 - DNA, 67 bp, Artificial Sequence
  Synthetic
ttagattgtttagttcctcgtttcctctcgttggacgcaaagagggaactaaacacttaattggtgt

SEQ ID NO: 843 - DNA, 67 bp, Artificial Sequence
  Synthetic
atagtaggaagatacagagtgtactctcaacgcacgtggaaaccgtagtactcttgcagttaaaaga

SEQ ID NO: 844 - DNA, 67 bp, Artificial Sequence
  Synthetic
tccacacgtgtaagcagtcctacacactcgatgtgagctgtttgcgggaacatatcgacgggttgca

SEQ ID NO: 845 - DNA, 67 bp, Artificial Sequence
  Synthetic
ttagattatttagtacctcgttatctctcgctggacgtaaagagggaacaaagcatctaataggtgt

SEQ ID NO: 846 - DNA, 66 bp, Artificial Sequence
  Synthetic
tattttggtagtttatagaagtaatttcagttgatgtcccagctcctccaaagaaaactaaatatt

SEQ ID NO: 847 - DNA, 67 bp, Artificial Sequence
  Synthetic
aaatttgttagggtaaaaaagtcatagttgggtgcgccatttaaaaataataataagactgtagcct

SEQ ID NO: 848 - DNA, 66 bp, Artificial Sequence
  Synthetic
ttattttggtagtttatagaagtaatttcagttgatgtcccagctcctccaaagaaaactaaatat

SEQ ID NO: 849 - DNA, 66 bp, Artificial Sequence
  Synthetic
tatggaattgtatcaatctcggcgtggttttgtcgataatttttagttcttctggttttaaattac

SEQ ID NO: 850 - DNA, 66 bp, Artificial Sequence; identical to SEQ ID NO: 849
  Synthetic

SEQ ID NO: 851 - DNA, 67 bp, Artificial Sequence
  Synthetic
tgtctctttttattagggtttatatcaactacacacatacgaagtgctcctgagagagaaagcgcat

SEQ ID NO: 852 - DNA, 66 bp, Artificial Sequence
  Synthetic
taaagatcgtaaaaaagaaatagagttccgaattgaccttacccagaaaaagtggagagaaagaaa

SEQ ID NO: 853 - DNA, 67 bp, Artificial Sequence
  Synthetic
tagtaatattatatgcaacattattctgtatttgaaatttcggaagtggcgcatcatggtccagaag

SEQ ID NO: 854 - DNA, 67 bp, Artificial Sequence
  Synthetic
tgtgtcttgatgtacaacattactctttattttcaaaaagatcagtggtcaaacggctcattaattt

SEQ ID NO: 855 - DNA, 67 bp, Artificial Sequence
  Synthetic
ttcattattttaatagagatagaaatcaaccatgcaagtgatcgccggtacgatgaacgtagggcga

SEQ ID NO: 856 - DNA, 67 bp, Artificial Sequence; identical to SEQ ID NO: 835
  Synthetic

SEQ ID NO: 857 - DNA, 66 bp, Artificial Sequence
  Synthetic
tatttatataaaatagtgtttttgtaaagtacacatcaggttatagtaatatcgaaaaaggaagcg

SEQ ID NO: 858 - DNA, 67 bp, Artificial Sequence
  Synthetic
ttagattgtttagtatctcgttatctctcgttggacgtaaagagggaacaaagcatctaataggtgt

SEQ ID NO: 859 - DNA, 67 bp, Artificial Sequence
  Synthetic
tggataaaaaaatacagcgtttttcatgtacaactatactcgtcggtaaaaaggcatcttatgatgg

SEQ ID NO: 860 - DNA, 66 bp, Artificial Sequence
  Synthetic
ttaataaactatggaagtatgtacagtcttgcaaccacggttgtatcccgtctaaagtactcgtac

SEQ ID NO: 861 - DNA, 66 bp, Artificial Sequence
  Synthetic
ttaatttttgtacggaagtagatactatctttcaacattggttgtattcctacaaagacactcatt

SEQ ID NO: 862 - DNA, 67 bp, Artificial Sequence
  Synthetic
gtctttttaccttatataacagtttcatgcacgtggagtgtgtagttaagctaatcaaggtaaatca

SEQ ID NO: 863 - DNA, 66 bp, Artificial Sequence
  Synthetic
tgttataaacctgtgtgagagttaagtttacatgggcaaagttgatgaccgggtcgtccgttcctt

SEQ ID NO: 864 - DNA, 67 bp, Artificial Sequence
  Synthetic
ttgacttttgacatcaatactacgcactccacatgatgggtttgcgggaaaagatctacaggctgaa

SEQ ID NO: 865 - DNA, 67 bp, Artificial Sequence
  Synthetic
tccataatatgggtaagacctatcaccacacgtggagtgcgtagtgttgctacaacgaagcaacggg

SEQ ID NO: 866 - DNA, 67 bp, Artificial Sequence; identical to SEQ ID NO: 843
  Synthetic

SEQ ID NO: 867 - DNA, 67 bp, Artificial Sequence
  Synthetic
ccgaagcatcgtatcaatgcttcggtcaatgtttggtggagctgaggagacgatatctagaaccgat

SEQ ID NO: 868 - DNA, 67 bp, Artificial Sequence; identical to SEQ ID NO: 867
  Synthetic

SEQ ID NO: 869 - DNA, 67 bp, Artificial Sequence; identical to SEQ ID NO: 867
  Synthetic

SEQ ID NO: 870 - DNA, 67 bp, Artificial Sequence
  Synthetic
gtagccacttgttttacacgtcttgtctctggacgaggccccggagttctcggggaaggcgctggac

SEQ ID NO: 871 - DNA, 67 bp, Artificial Sequence
  Synthetic
tatgataattttagtattcatgattggttgtttgaatggctacaaggtgaggcgttagagcaacagc

SEQ ID NO: 872 - DNA, 66 bp, Artificial Sequence
  Synthetic
acccttaaacatataacatgtttaagggtattcatttccttctttgtctactcctataggatcttg

SEQ ID NO: 873 - DNA, 66 bp, Artificial Sequence
  Synthetic
tgtgctcttttgttgtatttatatggcgtttggtcaattgatgactgggccacagcttttagctca

SEQ ID NO: 874 - DNA, 67 bp, Artificial Sequence
  Synthetic
gtcgtcaccttgttggtgtaattagattaaccccattaagccctaaagcgtcattcgtcgaaacagc

SEQ ID NO: 875 - DNA, 67 bp, Artificial Sequence
  Synthetic
cctgtattgtgctacttagagcataaggcgaccatgccctctacgacgcctacacgggcgtggtggt

SEQ ID NO: 876 - DNA, 66 bp, Artificial Sequence
  Synthetic
caaataatgtagtacccaaattaagtttcacacaacagagcctgtcacgaccggcggaaaaaacga

SEQ ID NO: 877 - DNA, 66 bp, Artificial Sequence
  Synthetic
tctgagaattagtatattttcctattcgcaggggcatccaagactgacgaagccgactttgggagt

SEQ ID NO: 878 - DNA, 66 bp, Artificial Sequence
  Synthetic
ataccaataacatataaagagtagtgtgtaatgaaataagtcttttagatatacttggcacagagg

SEQ ID NO: 879 - DNA, 67 bp, Artificial Sequence
  Synthetic
tccattaactgtggtgtacatcataacataactgttcattgctgctgatggggccgcagtggcgttc

SEQ ID NO: 880 - DNA, 66 bp, Artificial Sequence
  Synthetic
aaagcattatttaggcactacaactagtatagttgtacatgccattatcagtctcctttacaaacg

SEQ ID NO: 881 - DNA, 66 bp, Artificial Sequence
  Synthetic
gcccctagtataggatgggtttcgttagggtgccccaaggcgctggtcgactccgagcgcatcctc

SEQ ID NO: 882 - DNA, 66 bp, Artificial Sequence
  Synthetic
cccccagtgtaggatttatatcactaggttgccccaaggcgctggtcgactccgagcgcatcctca

SEQ ID NO: 883 - DNA, 67 bp, Artificial Sequence
  Synthetic
tagattgtttagtatctcattatctctcgttggacgcaaagagggaactaaacacttaattggtgtt

SEQ ID NO: 884 - DNA, 66 bp, Artificial Sequence
  Synthetic
tcgttccataatatgggtaagacctatcaccacatgtggagtgcatagcgttgatacaaagagtga

SEQ ID NO: 885 - DNA, 67 bp, Artificial Sequence
  Synthetic
ccccctcgtgttattgtgggtacatgatatttggcaaacctaaacaggagattactcgcctatttaa

SEQ ID NO: 886 - DNA, 67 bp, Artificial Sequence
  Synthetic
atatgacatcaatgccatcaactcgagccacgtggagtgcgtagtgttgctacaacgaagcaacggg

SEQ ID NO: 887 - DNA, 67 bp, Artificial Sequence; identical to SEQ ID NO: 795
  Synthetic

SEQ ID NO: 888 - DNA, 66 bp, Artificial Sequence; identical to SEQ ID NO: 797
  Synthetic

SEQ ID NO: 889 - DNA, 67 bp, Artificial Sequence
  Synthetic
cgaaagacatcaatactgtcctctcgagccatgttgagacggtagtgttaatggagagaaagtaaga

SEQ ID NO: 890 - DNA, 66 bp, Artificial Sequence
  Synthetic
aaagaaaaaattctttatttctacatacggttgtcagatgaatgaagaggattccgaaaaattatc

SEQ ID NO: 891 - DNA, 67 bp, Artificial Sequence
  Synthetic
ctttattttttttgtatcccatttcctctccctccctcatagcttgatccgaaaaagttacagctgg

SEQ ID NO: 892 - DNA, 67 bp, Artificial Sequence
  Synthetic
tgttctttttttggtatctcgtttcttcttcttccctcatagcttgatccgaaaaagttacagctgg

SEQ ID NO: 893 - DNA, 67 bp, Artificial Sequence; identical to SEQ ID NO: 892
  Synthetic

SEQ ID NO: 894 - DNA, 66 bp, Artificial Sequence
  Synthetic
cttaaagattgagtttacttttgcagtcattggggcatccaagactgacgaagccgactttgggag

SEQ ID NO: 895 - DNA, 66 bp, Artificial Sequence
  Synthetic
taaattttgatgaatggtgtgttacgcggtagaccgcacacgttcccccaatataacttattaata

SEQ ID NO: 896 - DNA, 66 bp, Artificial Sequence
  Synthetic
aatattaatgagtgttatgtaactagaaagaccgcacacgttcccccaatataacttattaatatt

SEQ ID NO: 897 - DNA, 66 bp, Artificial Sequence; identical to SEQ ID NO: 830
  Synthetic

SEQ ID NO: 898 - DNA, 66 bp, Artificial Sequence
  Synthetic
cccctagtataggatgggtttcgttagggtgccccaaggcgctggtcgactccgagcgcatcctca

SEQ ID NO: 899 - DNA, 67 bp, Artificial Sequence
  Synthetic
ctctttttattagggtttatatcaactatacacatacgaagtgctcctgagacagaaagcgcatatc

SEQ ID NO: 900 - DNA, 67 bp, Artificial Sequence
  Synthetic
aagatattaccctgaatgaagtcttacgtcgtcaaattgaagtggccgctaatcagttccttcaaaa

SEQ ID NO: 901 - DNA, 67 bp, Artificial Sequence; identical to SEQ ID NO: 900
  Synthetic

SEQ ID NO: 902 - DNA, 67 bp, Artificial Sequence
  Synthetic
tggcctctcctgaagtgtcagttgagcgccttcggtttcgccagcgtgcggcagttcaacgacacga

SEQ ID NO: 903 - DNA, 67 bp, Artificial Sequence; identical to SEQ ID NO: 875
  Synthetic

SEQ ID NO: 904 - DNA, 67 bp, Artificial Sequence
  Synthetic
tacgttgtttagtacctcaatttctctctctggacgcaaagagggaactaaacacttaattggtgtt

SEQ ID NO: 905 - DNA, 67 bp, Artificial Sequence
  Synthetic
aaacccatttttaccttatgtaaaaaaatcacgtgatttttttgcgggcatccgtgatgtggtcggc

SEQ ID NO: 906 - DNA, 66 bp, Artificial Sequence
  Synthetic
ggttttttatttgtatgccataattatacaccgcactcgctccctcaaacgctataatccccatag

SEQ ID NO: 907 - DNA, 66 bp, Artificial Sequence; identical to SEQ ID NO: 894
  Synthetic

SEQ ID NO: 908 - DNA, 67 bp, Artificial Sequence
  Synthetic
aacgtgcctttgtcgcagctgccaaagtttagccgacgtccccccatcctgagtagcagtcgggttt

SEQ ID NO: 909 - DNA, 67 bp, Artificial Sequence
  Synthetic
cctttaatttttgggttaaaggaacattgactctactcgtaatattacctaacacggaacgaaataa

SEQ ID NO: 910 - DNA, 66 bp, Artificial Sequence; identical to SEQ ID NO: 791
  Synthetic

SEQ ID NO: 911 - DNA, 67 bp, Artificial Sequence
  Synthetic
tccgtgataggccgcgtggcgtcgcctcagcaccaggtccttcaccacatagtccgccgccccctgc

SEQ ID NO: 912 - DNA, 66 bp, Artificial Sequence
  Synthetic
actcaaatgacattcattctgtcctctcaagccattgtgagacgtgcgtacttttgtcccacaaaa

SEQ ID NO: 913 - DNA, 67 bp, Artificial Sequence
  Synthetic
tcaactggtttagtgcctcatttcctctcgttggacgcaaagagggaactaaacacttaattggtgt

SEQ ID NO: 914 - DNA, 66 bp, Artificial Sequence
  Synthetic
agacattcatttttattagggtttatgtaaagtataagcagacaaaatgctcctgggataaaaagc

SEQ ID NO: 915 - DNA, 66 bp, Artificial Sequence
  Synthetic
aacattttacaagtatataacatgtaataggcaatgaaatctctttaatggatgttttaggtacag

SEQ ID NO: 916 - DNA, 66 bp, Artificial Sequence
  Synthetic
ttatttataggttttttgtcaaatacggtgatgtgtacctatagcccatccgtcgcgcaatgaaag

SEQ ID NO: 917 - DNA, 66 bp, Artificial Sequence
  Synthetic
agaataattatatgtcttctattggcggtaatacgttgattccatgggcgctcattccagctgctg

SEQ ID NO: 918 - DNA, 67 bp, Artificial Sequence; identical to SEQ ID NO: 795
  Synthetic

SEQ ID NO: 919 - DNA, 66 bp, Artificial Sequence
  Synthetic
ggttatttttacggaagtatacacattaaatattaatgcatgtaccgccatacatctttgttgatt

SEQ ID NO: 920 - DNA, 66 bp, Artificial Sequence
  Synthetic
ggtttttatatgtgcgttatgtaacaagcaccacattagttgttccatttatgtttatgtggttaa

SEQ ID NO: 921 - DNA, 66 bp, Artificial Sequence
  Synthetic
ttatttttttacggaagtatacacaataaatattaatgcatgtaccgccatacatctttgttgatt

SEQ ID NO: 922 - DNA, 66 bp, Artificial Sequence
  Synthetic
ttgatattttatggaagtatgcacaattaaccaaccatggctgtattccgtctaaagtgcttgtta

SEQ ID NO: 923 - DNA, 66 bp, Artificial Sequence
  Synthetic
aattggaaaatataaataattttagtaacctacatttccacaagtgtgaaagctttaaccttagct

SEQ ID NO: 924 - DNA, 67 bp, Artificial Sequence; identical to SEQ ID NO: 904
  Synthetic

SEQ ID NO: 925 - DNA, 66 bp, Artificial Sequence
  Synthetic
ctcttttttatgtatggtttgtaacaatatccactttactcgttccttatttatttatatttcttt

SEQ ID NO: 926 - DNA, 66 bp, Artificial Sequence
  Synthetic
tctttttttatgtatggtttgtaacaatatccactttactcgttccttatttatttatatttcttt

SEQ ID NO: 927 - DNA, 66 bp, Artificial Sequence
  Synthetic
ttagggttaccattgatcatgaagaccattatatagttgagtccgtataattgtgtaaaaagctag

SEQ ID NO: 928 - DNA, 66 bp, Artificial Sequence
  Synthetic
ttcaagtctaggatacgaacagtacgtttgcgcacttcgaacagaaagtagccgaggaagaagatg

SEQ ID NO: 929 - DNA, 67 bp, Artificial Sequence
  Synthetic
agatgtgatgttaattattctggtcagtacctcctgaccacccccactcgtaagtcataataattac

SEQ ID NO: 930 - DNA, 66 bp, Artificial Sequence
  Synthetic
ttaatatcagttgtatttatactactagctctgtcggtccagtaaacacgagtagcccctgtgaat

SEQ ID NO: 931 - DNA, 66 bp, Artificial Sequence
  Synthetic
aaacccttgatataccaatagtttcaaatccgtctaccgccttttaatattctaaaaaacctagga

SEQ ID NO: 932 - DNA, 66 bp, Artificial Sequence
  Synthetic
ttaatttagtatggaagtatgcacaattgagcaaccacggttgtatcccgtctaaagtactcgtac

SEQ ID NO: 933 - DNA, 66 bp, Artificial Sequence
  Synthetic
gtataaatatatggaagtacacacattatacattaatgcacgtgccgccatagttatctgatgatt

SEQ ID NO: 934 - DNA, 67 bp, Artificial Sequence
  Synthetic
tcacgtgttttaatggagttttaactggtctggatgtgcagcagccataacagctaaaaaggcaggt

SEQ ID NO: 935 - DNA, 66 bp, Artificial Sequence
  Synthetic
tagaagtatagggtttgtttcattggggtgcccgaaggccctcgtcgattccgagcgcatcctcac

SEQ ID NO: 936 - DNA, 67 bp, Artificial Sequence
  Synthetic
ctttaatttttgggttaaaggaacattgactctactcgtaatatttcctaatacagaacgaaataaa

SEQ ID NO: 937 - DNA, 67 bp, Artificial Sequence
  Synthetic
tcctgaatggttactacgattggtttggttggtgtcacgaacggtgcaatagtgatccacacccaac

SEQ ID NO: 938 - DNA, 66 bp, Artificial Sequence; identical to SEQ ID NO: 898
  Synthetic

SEQ ID NO: 939 - DNA, 66 bp, Artificial Sequence; identical to SEQ ID NO: 894
  Synthetic

SEQ ID NO: 940 - DNA, 66 bp, Artificial Sequence; identical to SEQ ID NO: 898
  Synthetic

SEQ ID NO: 941 - DNA, 66 bp, Artificial Sequence; identical to SEQ ID NO: 912
  Synthetic

SEQ ID NO: 942 - DNA, 66 bp, Artificial Sequence
  Synthetic
tttttatataatatagtgtttttgttaagtacacatcaggatacagtaacattgaaaaaggaactg

SEQ ID NO: 943 - DNA, 67 bp, Artificial Sequence
  Synthetic
gccctgttaatatgtatattggctaacgctcggcaacccgaagatcatgctgttctatctggcattg

SEQ ID NO: 944 - DNA, 67 bp, Artificial Sequence
  Synthetic
gccctgttaatatgtatatcggctaacgctcggcaacccgaagatcatgctgttctatctggcgttg

SEQ ID NO: 945 - DNA, 67 bp, Artificial Sequence
  Synthetic
aaatttatagtgagggtttgtcatagacaagacctggagttcacgcttcacatggtatggagagaac

SEQ ID NO: 946 - DNA, 66 bp, Artificial Sequence
  Synthetic
ttattttggtagtttatagaagtaatttcagttgatgtcccagctcctccaaaaaaaactaaatat

SEQ ID NO: 947 - DNA, 67 bp, Artificial Sequence; identical to SEQ ID NO: 844
  Synthetic

SEQ ID NO: 948 - DNA, 66 bp, Artificial Sequence
  Synthetic
ttaccctagacatcaatgctaccaactcaacatgagctgtttgcgggaacatatcgactggttgca

SEQ ID NO: 949 - DNA, 66 bp, Artificial Sequence
  Synthetic
gaaatgacgtacttttcatttcctcgtgccatgtggaaactgtagttaagctaagcaaataatatc

SEQ ID NO: 950 - DNA, 67 bp, Artificial Sequence
  Synthetic
tccattaactgtggtgtacatcataacataactgttcattgctgctgatgggaccgcagtggcgttc

SEQ ID NO: 951 - DNA, 67 bp, Artificial Sequence
  Synthetic
tactttaattttaggttaatggtccatttcctctatgatacgcccttccgaaagctgatactaacga

SEQ ID NO: 952 - DNA, 67 bp, Artificial Sequence
  Synthetic
cacattatttagttcctcgttttctctcgctggacgcaaagagggaactaaacacttaattggtgtt

SEQ ID NO: 953 - DNA, 66 bp, Artificial Sequence
  Synthetic
attaattttgtacggaagtagatactatctttcaacattggttgtattcctacaaagacactcatt

SEQ ID NO: 954 - DNA, 67 bp, Artificial Sequence
  Synthetic
tcgcggcccacttgctttacacgtctcgtccaggaagaggacgccccggtgggacagggacaccgcg

SEQ ID NO: 955 - DNA, 66 bp, Artificial Sequence
  Synthetic
taacgtatgtacggaagtatagacacctgattaatatcggatgtatacctactaaaacattaattc

SEQ ID NO: 956 - DNA, 66 bp, Artificial Sequence
  Synthetic
gtttttttgtttgcgttaaatggaattatccagtacggcatatgcagtagaaacaacgagtcaaca

SEQ ID NO: 957 - DNA, 67 bp, Artificial Sequence
  Synthetic
tcttggcgagtgagcagacctatacactcgatgtgagctgtttgcgggaacatatcgacgggttgca

SEQ ID NO: 958 - DNA, 66 bp, Artificial Sequence
  Synthetic
gcataaatatatggaagtacacacactatacatttatgcatgtaccgccatagctttctgtaaatt

SEQ ID NO: 959 - DNA, 67 bp, Artificial Sequence
  Synthetic
gaagccgtatagtataggaatggtgtcgcttgggtgccccaaggcactcgtcgattcggagcagatc

SEQ ID NO: 960 - DNA, 66 bp, Artificial Sequence
  Synthetic
ttcattagctttgttatcaccctgttggtaacaacctcatgcgcctaatggctacaaaaaacatct

SEQ ID NO: 961 - DNA, 66 bp, Artificial Sequence
  Synthetic
tttctgcattgtcctattataattatgagccatttgatcgcttcgacgatgcatacgaaagacgct

SEQ ID NO: 962 - DNA, 66 bp, Artificial Sequence
  Synthetic
tattcttagtggggcttaagtcaacttgtcattggtgtcatgtgatggagagagaatcttttgagg

SEQ ID NO: 963 - DNA, 66 bp, Artificial Sequence
  Synthetic
ctattaattgggggtatgtcttacttattagcgtacccaagcccccaatagtgccggcataaccga

SEQ ID NO: 964 - DNA, 66 bp, Artificial Sequence
  Synthetic
catctaccgcaaagtataggtatttaatccttcgggcagccaaggctgacgaagccgactttgggg

SEQ ID NO: 965 - DNA, 66 bp, Artificial Sequence
  Synthetic
tcaaaaaagcgtgagttttagataccaaacattcgatgaaagtgatactgagcctgagaaattaga

SEQ ID NO: 966 - DNA, 66 bp, Artificial Sequence
  Synthetic
aaagcattatttaggtactacaactagtatagttgtacatgccattatcagtctcctttacaaacg

SEQ ID NO: 967 - DNA, 66 bp, Artificial Sequence
  Synthetic
aaatcctcccttttacatctgtacgggcttggaagcggacatggcccatgcggaagaggcccgctg

SEQ ID NO: 968 - DNA, 67 bp, Artificial Sequence
  Synthetic
tctttatttttttgtatcccatttcctctccctccctcatagcttgatccgaaaaagttacagctgg

SEQ ID NO: 969 - DNA, 66 bp, Artificial Sequence
  Synthetic
ttatttatagactttttgtcaaatatagtgatgtgtacctatagcccatccgtcgcgcaatgaaag

SEQ ID NO: 970 - DNA, 66 bp, Artificial Sequence
  Synthetic
tttaatttattcgtatttacgttaccttcactacaacaaaatgttcctgattaagtgaagtcatgt

SEQ ID NO: 971 - DNA, 67 bp, Artificial Sequence
  Synthetic
ctccttttattagggtttgtgtcatctacacacatacgaagtgctcctgagacagaaagcgcatatc

SEQ ID NO: 972 - DNA, 67 bp, Artificial Sequence
  Synthetic
agtgtggttgtttttgttggaagtgtgtatcaggtatcaggatacctcatctgccaattaaaatttg

SEQ ID NO: 973 - DNA, 67 bp, Artificial Sequence
  Synthetic
atgttctttttttgtatctcgtttcttcttcttccctcatagcttgaaccgaaaaagttacagctgg

SEQ ID NO: 974 - DNA, 66 bp, Artificial Sequence
  Synthetic
tgagacaaacagccatggctggttcccggatacagatggcgcactcatcaccggactgacctttct

SEQ ID NO: 975 - DNA, 66 bp, Artificial Sequence
  Synthetic
tatcccctcctctcaaaacatgtagagaccgtagtacttttgcagttaaaagataaataaaggact

SEQ ID NO: 976 - DNA, 66 bp, Artificial Sequence; identical to SEQ ID NO: 975
  Synthetic

SEQ ID NO: 977 - DNA, 67 bp, Artificial Sequence
  Synthetic
ttagcttatttagtacctcgttttctctcgttggacgcaaagagggaactaaacacttaattggtgt

SEQ ID NO: 978 - DNA, 66 bp, Artificial Sequence
  Synthetic
taaattttaatagcagttgtgtcactatttaggtggcacctgtaccacccatagttaccacgaaca

SEQ ID NO: 979 - DNA, 66 bp, Artificial Sequence
  Synthetic
agttttatacataaaaatagtgtaacaagcactacattagtcgttccatttatgtttatgtggtta

SEQ ID NO: 980 - DNA, 66 bp, Artificial Sequence
  Synthetic
aaaaaaaggcgctctttgatgtagcgcccatatgcaccagcagttgctgaaaaatctatatttgtt

SEQ ID NO: 981 - DNA, 67 bp, Artificial Sequence
  Synthetic
tagattgtttagttcctcgtttcctctcgttggacgcaaagagggaactaaacacttaattggtgtt

SEQ ID NO: 982 - DNA, 67 bp, Artificial Sequence
  Synthetic
ttagattgtttagttcctcgttttctctcgttggacgcaaagagggaactaaacacttaattggtgt

SEQ ID NO: 983 - DNA, 66 bp, Artificial Sequence
  Synthetic
ggttatttttacggaagtatacacattaaatattaatgcatgtaccaccatacatctttgttgatt

SEQ ID NO: 984 - DNA, 66 bp, Artificial Sequence
  Synthetic
atgacttcgatagttaattatgaaacactcttggatccggacgtatccatcatggcgataatgacc

SEQ ID NO: 985 - DNA, 66 bp, Artificial Sequence
  Synthetic
tgcgttaggtgtatatcatgcctagcgcaattcatttccttctttatctactcctataggatcttg

SEQ ID NO: 986 - DNA, 67 bp, Artificial Sequence
  Synthetic
ttagcttgtttagtacctcgatttctctcgttggacgcaaagagggaactaaacacttaattggtgt

SEQ ID NO: 987 - DNA, 67 bp, Artificial Sequence; identical to SEQ ID NO: 913
  Synthetic

SEQ ID NO: 988 - DNA, 66 bp, Artificial Sequence
  Synthetic
agaattttattagtatttatgtcaggtttaagcaaacgaaattttcctgttgtaaaaacctcatat

SEQ ID NO: 989 - DNA, 67 bp, Artificial Sequence
  Synthetic
tatgtgggtttggttttctgttaaactacaccaccatgaatacgacgaaaaggctcacctccgggtg

SEQ ID NO: 990 - DNA, 67 bp, Artificial Sequence; identical to SEQ ID NO: 989
  Synthetic

SEQ ID NO: 991 - DNA, 67 bp, Artificial Sequence
  Synthetic
ttagattgtttagtatctcgttatctctcgttggacgcaaagagggaactaaacacttaattggtgt

SEQ ID NO: 992 - DNA, 66 bp, Artificial Sequence
  Synthetic
cgctgaaagctagtttacttttctattcgttggggcatccaagactgacgaagccgactttgggag

SEQ ID NO: 993 - DNA, 67 bp, Artificial Sequence
  Synthetic
attctttaaaaagagttctcgtattttattggaggacctataaggccaccttttatattatttccac

SEQ ID NO: 994 - DNA, 67 bp, Artificial Sequence
  Synthetic
ttctctaatcttctttatttctacatacggtcaaccccaggtttctatgaaaaattcacctataaca

SEQ ID NO: 995 - DNA, 66 bp, Artificial Sequence
  Synthetic
tagaaaataacatataaaaagtagtgtttatttcattaccttctttatctgttccgatagggtctt

SEQ ID NO: 996 - DNA, 66 bp, Artificial Sequence
  Synthetic
aggccagagcagcgtctggcctttaaataatggtggagcggaggaggatcgaactcccgaccttcg

SEQ ID NO: 997 - DNA, 67 bp, Artificial Sequence; identical to SEQ ID NO: 795
  Synthetic

SEQ ID NO: 998 - DNA, 67 bp, Artificial Sequence
  Synthetic
atagtaggaagatactaagtagacagtcaacgcacgtggaaaccgtagtactcttgcagttaaaaga

SEQ ID NO: 999 - DNA, 66 bp, Artificial Sequence
  Synthetic
acataaatatatggaagtacacacactatacatttatgcatgtaccgccatagctttctgtaaact

SEQ ID NO: 1000 - DNA, 66 bp, Artificial Sequence
  Synthetic
tatattgtcatcaccctgttggcgtcaacctaatgcgcctaatggctacaaaagacatctacttcg

SEQ ID NO: 1001 - DNA, 66 bp, Artificial Sequence
  Synthetic
tacatattttcattataatttaaagacggtaggagtccctggggggacagtaatggcatcattagg

SEQ ID NO: 1002 - DNA, 67 bp, Artificial Sequence
  Synthetic
ggtcaggcggcacctaggggggtggttaacgctcccacgccgtccactccgtgatgcgccggtccga

SEQ ID NO: 1003 - DNA, 67 bp, Artificial Sequence; identical to SEQ ID NO: 865
  Synthetic

SEQ ID NO: 1004 - DNA, 67 bp, Artificial Sequence; identical to SEQ ID NO: 886
  Synthetic

SEQ ID NO: 1005 - DNA, 67 bp, Artificial Sequence; identical to SEQ ID NO: 982
  Synthetic

SEQ ID NO: 1006 - DNA, 66 bp, Artificial Sequence; identical to SEQ ID NO: 884
  Synthetic

SEQ ID NO: 1007 - DNA, 67 bp, Artificial Sequence; identical to SEQ ID NO: 796
  Synthetic

SEQ ID NO: 1008 - DNA, 67 bp, Artificial Sequence
  Synthetic
tatttataattttagtttctcgattcgtctccgtccctcatagcttgatccgaaaaagttacagctg

SEQ ID NO: 1009 - DNA, 67 bp, Artificial Sequence; identical to SEQ ID NO: 788
  Synthetic

SEQ ID NO: 1010 - DNA, 66 bp, Artificial Sequence; identical to SEQ ID NO: 996
  Synthetic

SEQ ID NO: 1011 - DNA, 67 bp, Artificial Sequence
  Synthetic
aaacaaaaataaggggttattacccctatttatttctatcagtgtaaatcccttttcattcacagtt

SEQ ID NO: 1012 - DNA, 67 bp, Artificial Sequence; identical to SEQ ID NO: 851
  Synthetic

SEQ ID NO: 1013 - DNA, 66 bp, Artificial Sequence; identical to SEQ ID NO: 804
  Synthetic

SEQ ID NO: 1014 - DNA, 66 bp, Artificial Sequence
  Synthetic
tttttatttttatcccctaattatacatgggattggcattgtaaaagataaatagttcgcccactc

SEQ ID NO: 1015 - DNA, 66 bp, Artificial Sequence; identical to SEQ ID NO: 956
  Synthetic

SEQ ID NO: 1016 - DNA, 66 bp, Artificial Sequence
  Synthetic
aaagtttagatggggtttgtgggtagagcctcccaaaggttcctccacccataattgttatagaat

SEQ ID NO: 1017 - DNA, 66 bp, Artificial Sequence; identical to SEQ ID NO: 789
  Synthetic

SEQ ID NO: 1018 - DNA, 67 bp, Artificial Sequence
  Synthetic
gctaacagatcggcatatgagtgctatctactgctggcgcggtcccgcgatatcgcgccgcaggtac

SEQ ID NO: 1019 - DNA, 66 bp, Artificial Sequence
  Synthetic
aattggaaaatataaataattttagtaacctacatttccacaagtgtaaaagctttaaccttcgct

SEQ ID NO: 1020 - DNA, 67 bp, Artificial Sequence
  Synthetic
ttttatcaaaaattttactatccttgattgagatgaaaatacaagcttctttaccagtatgattccg

SEQ ID NO: 1021 - DNA, 66 bp, Artificial Sequence
  Synthetic
ttattttattatggaagtttgtacacttaacatttatgcatgtgccgccaaagttgtctgaggatt

SEQ ID NO: 1022 - DNA, 66 bp, Artificial Sequence; identical to SEQ ID NO: 953
  Synthetic

SEQ ID NO: 1023 - DNA, 67 bp, Artificial Sequence
  Synthetic
taaaatagtatgtatttatgtaagtttaaccacgacgaaatgttcctggttcaatgacgacatatct

SEQ ID NO: 1024 - DNA, 66 bp, Artificial Sequence
  Synthetic
cccgacagttgatgacagggtgcgaccccaccaccacccaacaccccggaaagcccttgttttaca

SEQ ID NO: 1025 - DNA, 66 bp, Artificial Sequence; identical to SEQ ID NO: 1024
  Synthetic

SEQ ID NO: 1026 - DNA, 67 bp, Artificial Sequence; identical to SEQ ID NO: 1008
  Synthetic

SEQ ID NO: 1027 - DNA, 66 bp, Artificial Sequence
  Synthetic
gtaattattttatgtattcatttccggctattcacacagcccaaataaaaaaagattttttctgct

SEQ ID NO: 1028 - DNA, 66 bp, Artificial Sequence
  Synthetic
tatattgtcatcaccctgttggcgtcaacctaatgcgcctaatggctacaaaagacatctactttg

SEQ ID NO: 1029 - DNA, 67 bp, Artificial Sequence; identical to SEQ ID NO: 809
  Synthetic

SEQ ID NO: 1030 - DNA, 67 bp, Artificial Sequence
  Synthetic
gaatgaatagctaattacagggacgccagcccaaatattgatgtactgaagttcagtaaagtctact

SEQ ID NO: 1031 - DNA, 66 bp, Artificial Sequence
  Synthetic
taatagaaagaaaaatatatttattatatctaattgaagcagcaattgtgcttttcattattagtt

SEQ ID NO: 1032 - DNA, 66 bp, Artificial Sequence
  Synthetic
tagatagagtttatggattataagaggtttattggaagaaaagaaggaacgaaggagttaacgcgt

SEQ ID NO: 1033 - DNA, 67 bp, Artificial Sequence
  Synthetic
aagagattcaccaagacttttagattgaccacctaaatagctgcgcggaatagtagatcactttgag

SEQ ID NO: 1034 - DNA, 66 bp, Artificial Sequence
  Synthetic
atcaataacggttgtatttgtagaacttgaccagttggtcctgtaaatataagcaatccatgtgag

SEQ ID NO: 1035 - DNA, 66 bp, Artificial Sequence
  Synthetic
actcaaatgacatcaattctgtcctctcaagacaaagcgtgtgtgttcaacgtttttttcttttcc

SEQ ID NO: 1036 - DNA, 66 bp, Artificial Sequence; identical to SEQ ID NO: 1035
  Synthetic

SEQ ID NO: 1037 - DNA, 67 bp, Artificial Sequence; identical to SEQ ID NO: 998
  Synthetic

SEQ ID NO: 1038 - DNA, 67 bp, Artificial Sequence
  Synthetic
gtctttatttttggtatcccgtttcttctccctccctcatagcttgaaccgaaaaagttacagctgg

SEQ ID NO: 1039 - DNA, 67 bp, Artificial Sequence
  Synthetic
attattatggattagtatctcatttattctccgtccctcatagcttgatccgaaaaagttacagctg

SEQ ID NO: 1040 - DNA, 67 bp, Artificial Sequence; identical to SEQ ID NO: 879
  Synthetic

SEQ ID NO: 1041 - DNA, 66 bp, Artificial Sequence
  Synthetic
atagtaggaagatacagagtgtactctcaacgcatgtagagaccgtagtacttttgcagttaaaag

SEQ ID NO: 1042 - DNA, 67 bp, Artificial Sequence
  Synthetic
ttagcttgtttagtacctcgatttctctcgttggacgcaaagagggaactaaacatttaattggtgt

SEQ ID NO: 1043 - DNA, 67 bp, Artificial Sequence
  Synthetic
ttagattatttagtacctcgttatctctcgctggacgtaaagagggaacaaagcacctaataggtgt

SEQ ID NO: 1044 - DNA, 67 bp, Artificial Sequence; identical to SEQ ID NO: 1038
  Synthetic

SEQ ID NO: 1045 - DNA, 67 bp, Artificial Sequence
  Synthetic
tactttaattttgggttaatggtccatttcctctatgatacgcccttccgaaagctgatactaacga

SEQ ID NO: 1046 - DNA, 66 bp, Artificial Sequence
  Synthetic
agttttatttttgtctatataggctgtcggcatctgcgtgtctcataacgtatttatgcgctacag

SEQ ID NO: 1047 - DNA, 67 bp, Artificial Sequence
  Synthetic
aaaaataaatatctttgtcgccatcgtgttggtgtaaaccttatgcgtttaatggcgacaaaacata

SEQ ID NO: 1048 - DNA, 66 bp, Artificial Sequence
  Synthetic
tacataatttcgtatattaggtataaccagtttcaatagtttggggaatctttgtaagtggtaagc

SEQ ID NO: 1049 - DNA, 66 bp, Artificial Sequence
  Synthetic
cgccttttttcgtatattaggtatttccaattgaaaccgggatcgggggccaattaggacacttag

SEQ ID NO: 1050 - DNA, 66 bp, Artificial Sequence
  Synthetic
cgctttgttgtcaccttgttggtgtaattagatttactccattaagccctaaagcatcattcgtcg

SEQ ID NO: 1051 - DNA, 67 bp, Artificial Sequence
  Synthetic
tttgtcgtcaccttgttggtgtaattaggtttacaccattaaggccaagagcatcatttgttgaaac

SEQ ID NO: 1052 - DNA, 67 bp, Artificial Sequence
  Synthetic
tttgtcgtcatcttgttggtgtaattaggtttacaccattaaggccaagagcatcatttgttgaaac

SEQ ID NO: 1053 - DNA, 67 bp, Artificial Sequence
  Synthetic
agactctttttttgggttaataaaacatttactagtgaatttgataatcctaaaatctttgatgatt

SEQ ID NO: 1054 - DNA, 66 bp, Artificial Sequence
  Synthetic
acaatacattttacttcaatgtataggtacattcggcacgacatttacacttccgaagtatgtcat

SEQ ID NO: 1055 - DNA, 67 bp, Artificial Sequence
  Synthetic
gtcgtcaccttgttggtgtaattaggttgactccattaagccctagagcatcattcgtcgaaacagc

SEQ ID NO: 1056 - DNA, 67 bp, Artificial Sequence
  Synthetic
cgctcctttaattttgcttaaaggagcaaagactagtactttaagagcaccaaaaataaataatgta

SEQ ID NO: 1057 - DNA, 66 bp, Artificial Sequence
  Synthetic
agtttaatttttgtctatattggctgtctgcatctgcatggcgcatcacatatttatgcgctacag

SEQ ID NO: 1058 - DNA, 67 bp, Artificial Sequence
  Synthetic
ttttatacctttttgaatatatttagagatcgtcatttccaccagggtaaagcccttggccacccgt

SEQ ID NO: 1059 - DNA, 66 bp, Artificial Sequence
  Synthetic
acaaaaaattagccacttttaggaactgtcctactagtaacgcttggcgctatcaacgcaacagcc

SEQ ID NO: 1060 - DNA, 67 bp, Artificial Sequence; identical to SEQ ID NO: 892
  Synthetic

SEQ ID NO: 1061 - DNA, 67 bp, Artificial Sequence; identical to SEQ ID NO: 795
  Synthetic

SEQ ID NO: 1062 - DNA, 67 bp, Artificial Sequence
  Synthetic
atgttcttttttggtatctcgtttcttcttcttccctcatagcttgatccgaaaaagttacagctgg

SEQ ID NO: 1063 - DNA, 66 bp, Artificial Sequence
  Synthetic
ggttttctttgcccctttgcgcgcacagtcccacgtcaacgcctggggcctgccgcacgcggtgtt

SEQ ID NO: 1064 - DNA, 66 bp, Artificial Sequence
  Synthetic
ctgcatctaccatgttctacaatctaccagcatcgacaccgccaagatctacgacaacgaggcggg

SEQ ID NO: 1065 - DNA, 67 bp, Artificial Sequence
  Synthetic
gcgcatttagtttgtgtttttaaaagcaataggatctccttttgcctggatataagtggcagtgaat

SEQ ID NO: 1066 - DNA, 67 bp, Artificial Sequence; identical to SEQ ID NO: 957
  Synthetic

SEQ ID NO: 1067 - DNA, 67 bp, Artificial Sequence; identical to SEQ ID NO: 904
  Synthetic

SEQ ID NO: 1068 - DNA, 66 bp, Artificial Sequence; identical to SEQ ID NO: 789
  Synthetic

SEQ ID NO: 1069 - DNA, 67 bp, Artificial Sequence
  Synthetic
tagattatttagtacctcgttatctctcgctggacgcaaagagggaactaaacacttaattggtgtt

SEQ ID NO: 1070 - DNA, 67 bp, Artificial Sequence
  Synthetic
atagtaggaagatactaagtagacagtcaatgcacgtggaaactgtagtactcttgcagttaaaaga

SEQ ID NO: 1071 - DNA, 66 bp, Artificial Sequence
  Synthetic
atcatccttatacgtgtttagctatgtaaaagcaccagaactttagccatttctaaccactcctcg

SEQ ID NO: 1072 - DNA, 66 bp, Artificial Sequence
  Synthetic
ggtttttttgtgtgtggttttgtatgttaaatcacaggtgctttccctcctggtgaacagtacaac

SEQ ID NO: 1073 - DNA, 67 bp, Artificial Sequence
  Synthetic
attacaatattactttatttagtctatctttaggtatcgagctggggaaggattaattggtagttgg

SEQ ID NO: 1074 - DNA, 66 bp, Artificial Sequence
  Synthetic
caccttttttatttgcccctttaggcgcactgttccacgtgaacgcctggggcctgccgcacgcca

SEQ ID NO: 1075 - DNA, 67 bp, Artificial Sequence; identical to SEQ ID NO: 812
  Synthetic

SEQ ID NO: 1076 - DNA, 67 bp, Artificial Sequence
  Synthetic
aaagtttttttagacgtactaaccaatatcatcccagcggcagtccccaaccttcgcaggcggatat

SEQ ID NO: 1077 - DNA, 66 bp, Artificial Sequence
  Synthetic
ggttttttgtttgcgttaaatggaattatccagtacggcatatgcagtagaaacaacgagtcaaca

SEQ ID NO: 1078 - DNA, 66 bp, Artificial Sequence; identical to SEQ ID NO: 1028
  Synthetic

SEQ ID NO: 1079 - DNA, 67 bp, Artificial Sequence; identical to SEQ ID NO: 795
  Synthetic

SEQ ID NO: 1080 - DNA, 67 bp, Artificial Sequence
  Synthetic
aattattacttgtgtttttgtagtggttgctgataaaaccatgcaacaagttttaagtaaaagtgca

SEQ ID NO: 1081 - DNA, 66 bp, Artificial Sequence
  Synthetic
gggaaagttttggggaagattttacatcatcataaaacaacgggcgtgttatacgcccgtttcaat

SEQ ID NO: 1082 - DNA, 66 bp, Artificial Sequence; identical to SEQ ID NO: 805
  Synthetic

SEQ ID NO: 1083 - DNA, 66 bp, Artificial Sequence
  Synthetic
taaaatgttcccattgattgtggtgtgtgtcctttcgttttttagcacaggttaagagccgttcat

SEQ ID NO: 1084 - DNA, 66 bp, Artificial Sequence
  Synthetic
tggggtcttgcatccagcgtgaatggttgtgcgacccgacctgtggatctggttcgctgttgatca

SEQ ID NO: 1085 - DNA, 66 bp, Artificial Sequence
  Synthetic
tttttttacgtgaatgttttgtaactactacgacattggtcgtcccgttcatgtttatgtggatga

SEQ ID NO: 1086 - DNA, 66 bp, Artificial Sequence
  Synthetic
gtttttattttatgccttaattatacaccgcacttgctccctcaaacgctataatccccatagttt

SEQ ID NO: 1087 - DNA, 66 bp, Artificial Sequence
  Synthetic
ttaatttagtatggaagtatgcacaattaaccaaccacggttgtatcccgtctaaagtactcgtac

SEQ ID NO: 1088 - DNA, 66 bp, Artificial Sequence
  Synthetic
atagtaggaagatactaagtagacagtcaacgcatgtagagaccgtagtacttttgcagttaaaag

SEQ ID NO: 1089 - DNA, 66 bp, Artificial Sequence
  Synthetic
caaataatgtagtacccaaattatgtttcacacaacagagcctgtcacgaccggcggaaaaaacga

SEQ ID NO: 1090 - DNA, 67 bp, Artificial Sequence
  Synthetic
tggaaaatttgataaatttggttacgttcatttcaatcagcgtaaaagcttttactttgagtgtacg

SEQ ID NO: 1091 - DNA, 67 bp, Artificial Sequence
  Synthetic
cttgttttattaatatttacgtaacgttatcagttggaccggtcagaattattaatccgtgtgcatg

SEQ ID NO: 1092 - DNA, 66 bp, Artificial Sequence
  Synthetic
cccaaccgagagcggttagggttcggatattggtggaggcggcgggaatcgaacccgcgtccagaa

SEQ ID NO: 1093 - DNA, 66 bp, Artificial Sequence; identical to SEQ ID NO: 1092
  Synthetic

SEQ ID NO: 1094 - DNA, 66 bp, Artificial Sequence
  Synthetic
ctcccagtgtaggatttatatcgctagggtgccccaaggcgctggtcgactccgagcgcatcctca

SEQ ID NO: 1095 - DNA, 66 bp, Artificial Sequence; identical to SEQ ID NO: 898
  Synthetic

SEQ ID NO: 1096 - DNA, 67 bp, Artificial Sequence
  Synthetic
agcgatgagtatacttttgctatcctacgggcacccaagggatacaaagcccacacgcggattgtgg

SEQ ID NO: 1097 - DNA, 67 bp, Artificial Sequence; identical to SEQ ID NO: 795
  Synthetic

SEQ ID NO: 1098 - DNA, 66 bp, Artificial Sequence
  Synthetic
aagagtgagagttttactatccttgattgaaatgttggtggtcttgctgattatcagcgtgctttt

SEQ ID NO: 1099 - DNA, 67 bp, Artificial Sequence
  Synthetic
cttctaatttttgtttgtataagcataacacatttgtatgattatcaggcaaaaaaggttttagaat

SEQ ID NO: 1100 - DNA, 67 bp, Artificial Sequence
  Synthetic
agctcgggttcttcgtgttttgccacgtatgttgaccgagagcgtggcgacgaggacggtcaccagg

SEQ ID NO: 1101 - DNA, 66 bp, Artificial Sequence; identical to SEQ ID NO: 926
  Synthetic

SEQ ID NO: 1102 - DNA, 66 bp, Artificial Sequence
  Synthetic
atagtaggaagatacagagtgtactctcaacgcatgtggaattagtggcgctattagcacctaagg

SEQ ID NO: 1103 - DNA, 66 bp, Artificial Sequence; identical to SEQ ID NO: 1102
  Synthetic

SEQ ID NO: 1104 - DNA, 67 bp, Artificial Sequence
  Synthetic
cgaaatatcgcaattacataaagcatgtacatgcatggctatatgatgtgaataaaatagaacccga

SEQ ID NO: 1105 - DNA, 67 bp, Artificial Sequence; identical to SEQ ID NO: 795
  Synthetic

SEQ ID NO: 1106 - DNA, 66 bp, Artificial Sequence
  Synthetic
tgttgaataggttggtcattggagaaccgagccattgtgagactgtagttaaacttattagagaat

SEQ ID NO: 1107 - DNA, 66 bp, Artificial Sequence; identical to SEQ ID NO: 1106
  Synthetic

SEQ ID NO: 1108 - DNA, 66 bp, Artificial Sequence
  Synthetic
ttgagcacttgtgcagttcgcgttgaccgtcccgagcctgcgggatcggatcgtgcagcgggctat

SEQ ID NO: 1109 - DNA, 66 bp, Artificial Sequence
  Synthetic
tgaatttttttcggtattcaagaccagctacttgcggggctggaaaaactgaaatgctattttacg

SEQ ID NO: 1110 - DNA, 67 bp, Artificial Sequence
  Synthetic
cgtttatagtgttttaggtggttggcacccctaccgattgacttaatcccccaacaaaagtcgtttc

SEQ ID NO: 1111 - DNA, 66 bp, Artificial Sequence
  Synthetic
ctaataattgtatcaaatatggaacgcataccgatactgatcatatgggggatatcgaagtggttg

SEQ ID NO: 1112 - DNA, 66 bp, Artificial Sequence; identical to SEQ ID NO: 1111
  Synthetic

SEQ ID NO: 1113 - DNA, 66 bp, Artificial Sequence
  Synthetic
aaagcattatttaggcactacaactagtatagttgtacatgccattatcggtctcctttacaaacg

SEQ ID NO: 1114 - DNA, 66 bp, Artificial Sequence; identical to SEQ ID NO: 880
  Synthetic

SEQ ID NO: 1115 - DNA, 66 bp, Artificial Sequence; identical to SEQ ID NO: 880
  Synthetic

SEQ ID NO: 1116 - DNA, 67 bp, Artificial Sequence; identical to SEQ ID NO: 859
  Synthetic

SEQ ID NO: 1117 - DNA, 67 bp, Artificial Sequence
  Synthetic
aacgatgctcgcgagtcctttagagacactgacccaggggtccggcaggaacagccgccagttgacg

SEQ ID NO: 1118 - DNA, 66 bp, Artificial Sequence
  Synthetic
taacttatgtacggaagtatagacactcgattaatatcggatgtatacctactaaaacattaattc

SEQ ID NO: 1119 - DNA, 66 bp, Artificial Sequence
  Synthetic
tttttaaattttggtaattaatggagtgaacatcaacggatagcggtgttaaagattttcggggaa

SEQ ID NO: 1120 - DNA, 66 bp, Artificial Sequence; identical to SEQ ID NO: 969
  Synthetic

SEQ ID NO: 1121 - DNA, 67 bp, Artificial Sequence; identical to SEQ ID NO: 977
  Synthetic

SEQ ID NO: 1122 - DNA, 66 bp, Artificial Sequence
  Synthetic
gaaaaaaagtgtacatggtagagagttaaaccagtacaatcgccacagtacacttatgtcagccta

SEQ ID NO: 1123 - DNA, 66 bp, Artificial Sequence
  Synthetic
tttatttaatgtagttaggttgtgtttaattgaccaaaccatggtgtttgaaatgcactgccgcca

SEQ ID NO: 1124 - DNA, 66 bp, Artificial Sequence
  Synthetic
taacttatgtacggaagtatagacacttgattaatatcggatgtataccgactaaaacattaattc

SEQ ID NO: 1125 - DNA, 66 bp, Artificial Sequence
  Synthetic
ttaataaactatggaagtatgtacagtcttgcaatcacggctgtatcccctctaaagtgctcgtgc

SEQ ID NO: 1126 - DNA, 67 bp, Artificial Sequence; identical to SEQ ID NO: 1069
  Synthetic

SEQ ID NO: 1127 - DNA, 66 bp, Artificial Sequence
  Synthetic
gttatctttttatgtattcatttcgggctattcacacagcccaaataaaaaaagagtctttcttct

SEQ ID NO: 1128 - DNA, 67 bp, Artificial Sequence
  Synthetic
agcatggtttgtatattggctaacgttcgggttgccgagcgtgaccagcgtgccggccgcgaacatg

SEQ ID NO: 1129 - DNA, 66 bp, Artificial Sequence
  Synthetic
tatttatataaaatagtgtttttgtaaagtacacatcaggttacagtaacattgaaaaaggaactg

SEQ ID NO: 1130 - DNA, 67 bp, Artificial Sequence; identical to SEQ ID NO: 951
  Synthetic

SEQ ID NO: 1131 - DNA, 67 bp, Artificial Sequence
  Synthetic
tactttaattttaggttaatggtccatttcctctatgatatgccctgctgaaagctgatactaacga

SEQ ID NO: 1132 - DNA, 66 bp, Artificial Sequence
  Synthetic
ccacacgtgtaagcagtcctacacactcgatgtgagctgtttgcgggaacatatcgactggttgca

SEQ ID NO: 1133 - DNA, 66 bp, Artificial Sequence; identical to SEQ ID NO: 1132
  Synthetic

SEQ ID NO: 1134 - DNA, 66 bp, Artificial Sequence
  Synthetic
tataaaaaatacggaagtatacacattaaatattaatgcatgtaccaccatacatctttgttgatt

SEQ ID NO: 1135 - DNA, 66 bp, Artificial Sequence; identical to SEQ ID NO: 933
  Synthetic

SEQ ID NO: 1136 - DNA, 66 bp, Artificial Sequence
  Synthetic
cacggcattgtattaaactcagtaagattatttcaaaaacactaaagaatcgtcgttctttttgat

SEQ ID NO: 1137 - DNA, 66 bp, Artificial Sequence; identical to SEQ ID NO: 1136
  Synthetic

SEQ ID NO: 1138 - DNA, 67 bp, Artificial Sequence
  Synthetic
gtaggctctttttgggttaatataacactcactagcgaagaaggtctgccaaaagaaaatttagatt

SEQ ID NO: 1139 - DNA, 66 bp, Artificial Sequence; identical to SEQ ID NO: 898
  Synthetic

SEQ ID NO: 1140 - DNA, 66 bp, Artificial Sequence; identical to SEQ ID NO: 898
  Synthetic

SEQ ID NO: 1141 - DNA, 66 bp, Artificial Sequence; identical to SEQ ID NO: 880
  Synthetic

SEQ ID NO: 1142 - DNA, 66 bp, Artificial Sequence; identical to SEQ ID NO: 1113
  Synthetic

SEQ ID NO: 1143 - DNA, 66 bp, Artificial Sequence; identical to SEQ ID NO: 880
  Synthetic

SEQ ID NO: 1144 - DNA, 66 bp, Artificial Sequence; identical to SEQ ID NO: 808
  Synthetic

SEQ ID NO: 1145 - DNA, 67 bp, Artificial Sequence
  Synthetic
gaatagctttttgccatattgacatactgcaagtgcggttggtaagagcacaacgtgtcgtgagtta

SEQ ID NO: 1146 - DNA, 67 bp, Artificial Sequence
  Synthetic
gtggaatttttagtattcataacgggctattcaaactgcccaaatcaaatattccgacagccctggt

SEQ ID NO: 1147 - DNA, 67 bp, Artificial Sequence; identical to SEQ ID NO: 959
  Synthetic

SEQ ID NO: 1148 - DNA, 67 bp, Artificial Sequence
  Synthetic
ttactgcggtgtacattattgcatgactacgaacagtcagtcgtaccaccgccgatatccaccacca

SEQ ID NO: 1149 - DNA, 67 bp, Artificial Sequence
  Synthetic
ttactgcggtgtacattcttgcatgactacgaacagtcagtcgtaccaccgccgatatccaccacca

SEQ ID NO: 1150 - DNA, 66 bp, Artificial Sequence
  Synthetic
ctctcctgaagtgtcagttgagcgccttcggtttcgccagcgtgcggcagttcaacgacacgatcc

SEQ ID NO: 1151 - DNA, 67 bp, Artificial Sequence
  Synthetic
cagggttactttatacaacattaatctgtatttgaaatttcggaagtggcgcatcatggtccagaag

SEQ ID NO: 1152 - DNA, 67 bp, Artificial Sequence; identical to SEQ ID NO: 853
  Synthetic

SEQ ID NO: 1153 - DNA, 66 bp, Artificial Sequence; identical to SEQ ID NO: 992
  Synthetic

SEQ ID NO: 1154 - DNA, 66 bp, Artificial Sequence; identical to SEQ ID NO: 992
  Synthetic

SEQ ID NO: 1155 - DNA, 67 bp, Artificial Sequence; identical to SEQ ID NO: 795
  Synthetic

SEQ ID NO: 1156 - DNA, 66 bp, Artificial Sequence
  Synthetic
ctccttttattagggtttgtgtcatctacacacatacgaagtgctcctgagacagaaagcgcatat

SEQ ID NO: 1157 - DNA, 67 bp, Artificial Sequence
  Synthetic
gtctttatttttggtatcccgtttcttctccctccctcatagcttgatccgaaaaagttacagctgg

SEQ ID NO: 1158 - DNA, 67 bp, Artificial Sequence; identical to SEQ ID NO: 1038
  Synthetic

SEQ ID NO: 1159 - DNA, 67 bp, Artificial Sequence
  Synthetic
atgttcttttttggtatctcgtttattcttcttccctcatagcttgatccgaaaaagttacagctgg

SEQ ID NO: 1160 - DNA, 67 bp, Artificial Sequence; identical to SEQ ID NO: 892
  Synthetic

SEQ ID NO: 1161 - DNA, 66 bp, Artificial Sequence
  Synthetic
cgttcgtgctttgtcgtcaccttgttggtgtaattagatttactccattaagccccaacgcatcat

SEQ ID NO: 1162 - DNA, 67 bp, Artificial Sequence
  Synthetic
tttctaagcttttacaagcagagcaacacactccacgtgatgcgtatttggaaataaatcagccggc

SEQ ID NO: 1163 - DNA, 67 bp, Artificial Sequence; identical to SEQ ID NO: 1162
  Synthetic

SEQ ID NO: 1164 - DNA, 67 bp, Artificial Sequence
  Synthetic
tctacacgagtaagcagacctacacactcgatgtgagctgtttgcgggaacatatcgacgggttgca

SEQ ID NO: 1165 - DNA, 67 bp, Artificial Sequence; identical to SEQ ID NO: 957
  Synthetic

SEQ ID NO: 1166 - DNA, 67 bp, Artificial Sequence; identical to SEQ ID NO: 844
  Synthetic

SEQ ID NO: 1167 - DNA, 67 bp, Artificial Sequence; identical to SEQ ID NO: 998
  Synthetic

SEQ ID NO: 1168 - DNA, 67 bp, Artificial Sequence; identical to SEQ ID NO: 998
  Synthetic

SEQ ID NO: 1169 - DNA, 66 bp, Artificial Sequence
  Synthetic
ccacacgtgtaagcagtcctacacactcgatgtgatgtgtttgtgggaataaatcgactggttgta

SEQ ID NO: 1170 - DNA, 66 bp, Artificial Sequence; identical to SEQ ID NO: 1169
  Synthetic

SEQ ID NO: 1171 - DNA, 66 bp, Artificial Sequence
  Synthetic
tattagttagatgtcatagaccgatttacagcgggctcaacgactgggttcggtccgtcgcgggac

SEQ ID NO: 1172 - DNA, 66 bp, Artificial Sequence
  Synthetic
gtgctttagtcaacaatactacgctctcaacgtgtggcgtatttgggaacatatccatacacttaa

SEQ ID NO: 1173 - DNA, 66 bp, Artificial Sequence; identical to SEQ ID NO: 1172
  Synthetic

SEQ ID NO: 1174 - DNA, 66 bp, Artificial Sequence
  Synthetic
tttttatttttatcccctaattatacatggcattggcattgtaaaagataaatagttcgcccactc

SEQ ID NO: 1175 - DNA, 67 bp, Artificial Sequence; identical to SEQ ID NO: 1157
  Synthetic

SEQ ID NO: 1176 - DNA, 66 bp, Artificial Sequence; identical to SEQ ID NO: 932
  Synthetic

SEQ ID NO: 1177 - DNA, 66 bp, Artificial Sequence; identical to SEQ ID NO: 805
  Synthetic

SEQ ID NO: 1178 - DNA, 67 bp, Artificial Sequence; identical to SEQ ID NO: 795
  Synthetic

SEQ ID NO: 1179 - DNA, 66 bp, Artificial Sequence; identical to SEQ ID NO: 1174
  Synthetic

SEQ ID NO: 1180 - DNA, 69 bp, Artificial Sequence
  Synthetic
tctaactcacgacacgttgtactcttaccaaccgcacttgctccctcaaacgctataatccccatagtt

SEQ ID NO: 1181 - DNA, 68 bp, Artificial Sequence
  Synthetic
catttttaccttgctcttctctcgaatttcagcatctgcatggcgcataacatatttatgcgctacag

SEQ ID NO: 1182 - DNA, 68 bp, Artificial Sequence
  Synthetic
acaatcaacaaagatgtatggtggtacatgcattaatatcggatgtataccgactaaaacattaattc

SEQ ID NO: 1183 - DNA, 68 bp, Artificial Sequence
  Synthetic
tacagacttacatgggaccattctatagcagctttaagatgcgtgagggacaagattaccagactcag

SEQ ID NO: 1184 - DNA, 68 bp, Artificial Sequence
  Synthetic
tgtaatttcggacacgagttcgactctcgtcatctccaccaaaatatcaatatccaagtctttgaatt

SEQ ID NO: 1185 - DNA, 68 bp, Artificial Sequence
  Synthetic
atatgttcccgcaaacagcacacgttgagacggtagtacttttgcagttaaaagataaataaaggact

SEQ ID NO: 1186 - DNA, 69 bp, Artificial Sequence
  Synthetic
tcggcttagtgatgccgagttcagctggtaaaccttgggtacttgcttctcagctactttccctctttt

SEQ ID NO: 1187 - DNA, 69 bp, Artificial Sequence
  Synthetic
gtcttctggaccatgatgcgccacttctgaaatttcaaaaagatcagtggtcaaacggctcattaattt

SEQ ID NO: 1188 - DNA, 69 bp, Artificial Sequence
  Synthetic
cgggcaaattgctgccatatggaccggaggcgggactttaattccttgggcgcttattcctgccgctgc

SEQ ID NO: 1189 - DNA, 68 bp, Artificial Sequence
  Synthetic
tgatttgattgtattggatattatgttaccagatggcgaaggttatgatatttgtaaagaaataagaa

SEQ ID NO: 1190 - DNA, 69 bp, Artificial Sequence
  Synthetic
gcccgtggatttgtttccaatgacgcatcacgtggagacggtagcacttttgtccaaacttgatgtcga

SEQ ID NO: 1191 - DNA, 69 bp, Artificial Sequence
  Synthetic
gctggtggtggatatcggcggtggtacgactgactgttcattgctgctgatggggccgcagtggcgttc

SEQ ID NO: 1192 - DNA, 69 bp, Artificial Sequence
  Synthetic
ggaggctaaaaccttttttgcctgataatcatacaaataagtgccattacaacaaattgcaggtgtatc

SEQ ID NO: 1193 - DNA, 68 bp, Artificial Sequence
  Synthetic
agctaagtgtccaagctggcccccgatcccagtttcaatagtttggggaatctttgtaagtgggagac

SEQ ID NO: 1194 - DNA, 68 bp, Artificial Sequence
  Synthetic
acaacaaagacgctaaggtttacgtggttaatggagacagtcgtcaagatattacaggttcatttaca

SEQ ID NO: 1195 - DNA, 68 bp, Artificial Sequence
  Synthetic
ccccaaagtcggcttcgtcagccttggctgcccgaaggcccttgttgattccgagcgcatcctcaccc

SEQ ID NO: 1196 - DNA, 68 bp, Artificial Sequence
  Synthetic
atatcccaaatggaaaagttgttaaaccgtgtataacgataccaatcccccaacctccaagtggatat

SEQ ID NO: 1197 - DNA, 68 bp, Artificial Sequence
  Synthetic
aacgtttgtaaaggagactgataatggcatgtacaactatactcgtcggtaaaaaggcatcttatgat

SEQ ID NO: 1198 - DNA, 69 bp, Artificial Sequence
  Synthetic
gcccaggtgtgtctgaggtcatggaaacggaaatcttcctcatttatgcccgtcttatccgtttccgct

SEQ ID NO: 1199 - DNA, 69 bp, Artificial Sequence
  Synthetic
taacaccaattaagtgtttagttccctctttgcgtccctcatagcttgatccgaaaaagttacagctgg

SEQ ID NO: 1200 - DNA, 68 bp, Artificial Sequence
  Synthetic
ctgagtgggcgaactatttatcttttacaatgccaagcgggtatagcgggaagaaaggacaaaattta

SEQ ID NO: 1201 - DNA, 69 bp, Artificial Sequence
  Synthetic
gaaactatggggattatagcgtttgagggagcaagtgcggttggtaagagtagcacgtgtcgtgaatta

SEQ ID NO: 1202 - DNA, 68 bp, Artificial Sequence
  Synthetic
ccgtcccgcgacggaccgaacccagtcgttgagccccttgttctcgtgaatcaccaataccgtgcccc

SEQ ID NO: 1203 - DNA, 69 bp, Artificial Sequence
  Synthetic
agactcaaaaactgcaaccttaaagctttcacattgcttgaaagcttattaacgctatcagtaacaagt

SEQ ID NO: 1204 - DNA, 69 bp, Artificial Sequence
  Synthetic
gacgacgtcaaatgagaaatctgttacacgtgtaacattagcagttaaccgccgttttaaatcgcaaaa

SEQ ID NO: 1205 - DNA, 68 bp, Artificial Sequence
  Synthetic
gttaacaagcactttagacggaatacagccatggtttatgcatgtaccgccatagctttctgtaaact

SEQ ID NO: 1206 - DNA, 69 bp, Artificial Sequence
  Synthetic
agaactgcgctttttacaacaagagcattttgtttgtttatatttaaatacaaaaaatcaagttatata

SEQ ID NO: 1207 - DNA, 68 bp, Artificial Sequence
  Synthetic
tataggctgacataagtgtactgtggcgattgtactgattcacttccccatacccaaacatattacac

SEQ ID NO: 1208 - DNA, 68 bp, Artificial Sequence
  Synthetic
taaggataagaaggttaaagcatttacacttttagagagccttattgtattatcagtagtggcattta

SEQ ID NO: 1209 - DNA, 68 bp, Artificial Sequence
  Synthetic
attccaaccatcaccaagaacatctttacttccaagctaagcgacttccctatctcacagggggcaac

SEQ ID NO: 1210 - DNA, 68 bp, Artificial Sequence
  Synthetic
tctggcggcagtgcatttcaaacaccatggtttggtcaattgatgactgggccacagcttttagctca

SEQ ID NO: 1211 - DNA, 69 bp, Artificial Sequence
  Synthetic
tcctaagggctaattgcaggttcgattcctgcaggggacaccagatacccttcaaacgaaatctacctt

SEQ ID NO: 1212 - DNA, 69 bp, Artificial Sequence
  Synthetic
aaatagaaaaatgaatccgttgaagcctgcttttttatactaacttgagcgaaacgggaaggtaaaaag

SEQ ID NO: 1213 - DNA, 68 bp, Artificial Sequence
  Synthetic
gacgaaatagatattttttgtggccattaagcgcattagatttaccccatttaatcctaaagcatcat

SEQ ID NO: 1214 - DNA, 68 bp, Artificial Sequence
  Synthetic
aacgaagtagatgttttttgttgccattaggcgcattagatttaccccatttaatcctaatgcatcat

SEQ ID NO: 1215 - DNA, 68 bp, Artificial Sequence
  Synthetic
aatattaataagttatattgggggaacgtgtgcggtagaagtggtaccattcatgtccttacgagata

SEQ ID NO: 1216 - DNA, 69 bp, Artificial Sequence
  Synthetic
atcgctgtagcgcataaatacgttatgagacacgcagatgctgaaattcgagaaaagagcaaagtaaag

SEQ ID NO: 1217 - DNA, 69 bp, Artificial Sequence
  Synthetic
catctttactttgctcttttctcgaatttcagcatctgcgtgtctcataacgtatttatgcgctacagc

SEQ ID NO: 1218 - DNA, 69 bp, Artificial Sequence
  Synthetic
atcccatgatgagccgagatgacataacccaccatttcattgaatgtcattctctcacctttatcaacc

SEQ ID NO: 1219 - DNA, 68 bp, Artificial Sequence
  Synthetic
tcaaaagttaagggttaaagcatttacgcttttagaatgtttggtagcattggttacaatcacaggag

SEQ ID NO: 1220 - DNA, 68 bp, Artificial Sequence
  Synthetic
gttactatagctcagatgattaagggacacagcctaggctgtgtcccttaattacgtaagcgttgata

SEQ ID NO: 1221 - DNA, 68 bp, Artificial Sequence
  Synthetic
gaatgatgcgttggggcttaatggagtaaatctaatgcgcctaatggctacaaaagacatctacttcg

SEQ ID NO: 1222 - DNA, 68 bp, Artificial Sequence
  Synthetic
ggatcaaaaagaacgacgattctttagtgtttttgatccaaccatgggttcaggttcattgatgttaa

SEQ ID NO: 1223 - DNA, 69 bp, Artificial Sequence
  Synthetic
ggaaattaatgagccgtttgaccactgatctttttgaaatttcagaagtggcgcatcatggtccagaag

SEQ ID NO: 1224 - DNA, 69 bp, Artificial Sequence
  Synthetic
gtcttctggaccatgatgcgccacttccgaaatttcaaaaagatcagtggtcaaacggctcattaattt

SEQ ID NO: 1225 - DNA, 69 bp, Artificial Sequence; identical to SEQ ID NO: 1224
  Synthetic

SEQ ID NO: 1226 - DNA, 69 bp, Artificial Sequence; identical to SEQ ID NO: 1224
  Synthetic

SEQ ID NO: 1227 - DNA, 69 bp, Artificial Sequence; identical to SEQ ID NO: 1224
  Synthetic

SEQ ID NO: 1228 - DNA, 68 bp, Artificial Sequence
  Synthetic
acaatcaacaaagatgtatggcggtacatgcattaatatcggatgtataccgactaaaacattaattc

SEQ ID NO: 1229 - DNA, 68 bp, Artificial Sequence
  Synthetic
atgaattaatgttttagtcggtatacatccgatattaatgcatgtaccgccatacatctttgttgatt

SEQ ID NO: 1230 - DNA, 68 bp, Artificial Sequence
  Synthetic
acaatcaacaaagatgtatggtggtacatgcattaatatcggatgtatacctactaaaacattaattc

SEQ ID NO: 1231 - DNA, 69 bp, Artificial Sequence
  Synthetic
ctgtttcaacaaatgatgctcttggccttaatggtgtaaaccttatgcgtttaatggcgacaaaacata

SEQ ID NO: 1232 - DNA, 69 bp, Artificial Sequence
  Synthetic
agaaaaagtgaatgtattcactgttggctggattggagttgcatgcactcaccctcctatgctaagtgt

SEQ ID NO: 1233 - DNA, 69 bp, Artificial Sequence
  Synthetic
atacgatttcggacaggggttcgactcccctcgcctccaccattcaaatgagcaagtcgtaaaaacata

SEQ ID NO: 1234 - DNA, 69 bp, Artificial Sequence
  Synthetic
aaccagctgtaactttttcggatcaagctatgagggacgcaaagagggaactaaacacttaattggtgt

SEQ ID NO: 1235 - DNA, 69 bp, Artificial Sequence
  Synthetic
tatgcaacccgtcgatatgttcccgcaaacagctcacgtggaaaccgtagtactcttgcagttaaaaga

SEQ ID NO: 1236 - DNA, 69 bp, Artificial Sequence
  Synthetic
tatcttttaactgcaagagtactacggtttccacgtgagctgtttgcgggaacatatcgacgggttgca

SEQ ID NO: 1237 - DNA, 69 bp, Artificial Sequence
  Synthetic
aaccagctgtaactttttcggatcgagttatgatggacgtaaagagggaacaaagcatctaataggtgt

SEQ ID NO: 1238 - DNA, 68 bp, Artificial Sequence
  Synthetic
ttttccccgaaaatctttaacaccgctatccgttgatgtcccagctcctccaaagaaaactaaatatt

SEQ ID NO: 1239 - DNA, 69 bp, Artificial Sequence
  Synthetic
ggatcagaaggttaggggttcgactcctcttgggtgcgccatttaaaaataataataagactgtagcct

SEQ ID NO: 1240 - DNA, 68 bp, Artificial Sequence
  Synthetic
ttttcccccgaaaatctttaacaccactatctgttgatgtcccagctcctccaaagaaaactaaatat

SEQ ID NO: 1241 - DNA, 68 bp, Artificial Sequence
  Synthetic
gtaaactaaaatatgcccagaccccattgcgttatcgataatttttagttcttctggttttaaattac

SEQ ID NO: 1242 - DNA, 68 bp, Artificial Sequence; identical to SEQ ID NO: 1241
  Synthetic

SEQ ID NO: 1243 - DNA, 69 bp, Artificial Sequence
  Synthetic
cttgtggatcacctggtttttcgtgttcagatacacacatacgaagtgctcctgagagagaaagcgcat

SEQ ID NO: 1244 - DNA, 68 bp, Artificial Sequence
  Synthetic
gaaggcagaccattaacaggaagggatggagcatttgaccttacccagaaaaagtggagagaaagaaa

SEQ ID NO: 1245 - DNA, 69 bp, Artificial Sequence
  Synthetic
ggaaattaatgagccgtttgaccactgatctttttgaaatttcggaagtggcgcatcatggtccagaag

SEQ ID NO: 1246 - DNA, 69 bp, Artificial Sequence; identical to SEQ ID NO: 1224
  Synthetic

SEQ ID NO: 1247 - DNA, 69 bp, Artificial Sequence
  Synthetic
gcttctgcttggattttacgccatccagccaatatgcaagtgatcgccggtacgatgaacgtagggcga

SEQ ID NO: 1248 - DNA, 69 bp, Artificial Sequence; identical to SEQ ID NO: 1224
  Synthetic

SEQ ID NO: 1249 - DNA, 68 bp, Artificial Sequence
  Synthetic
agcttttattgcaagaaaaatgggttataagtacacatcaggttatagtaatatcgaaaaaggaagcg

SEQ ID NO: 1250 - DNA, 69 bp, Artificial Sequence; identical to SEQ ID NO: 1237
  Synthetic

SEQ ID NO: 1251 - DNA, 69 bp, Artificial Sequence
  Synthetic
acgtttgtaaaggagactgataatggcatgtacaactatactcgtcggtaaaaaggcatcttatgatgg

SEQ ID NO: 1252 - DNA, 68 bp, Artificial Sequence
  Synthetic
acaatcatcagataactatggcggcacgtgcattaaccacggttgtatcccgtctaaagtactcgtac

SEQ ID NO: 1253 - DNA, 68 bp, Artificial Sequence
  Synthetic
aacaatctgcaaacatgtatggcggtacatgtatcaacattggttgtattcctacaaagacactcatt

SEQ ID NO: 1254 - DNA, 69 bp, Artificial Sequence
  Synthetic
acagcctgtggatatgtttgcacagactgctcacgtggagtgtgtagttaagctaatcaaggtaaatca

SEQ ID NO: 1255 - DNA, 68 bp, Artificial Sequence
  Synthetic
cgagacgagaaacgttccgtccgtctgggtcagttgggcaaagttgatgaccgggtcgtccgttcctt

SEQ ID NO: 1256 - DNA, 69 bp, Artificial Sequence
  Synthetic
attctcctttaacgaatgaagcgactaattcgatatgatgggtttgcgggaaaagatctacaggctgaa

SEQ ID NO: 1257 - DNA, 69 bp, Artificial Sequence
  Synthetic
cagccggctgatttatttccaaatacgcatcacgtggagtgcgtagtgttgctacaacgaagcaacggg

SEQ ID NO: 1258 - DNA, 69 bp, Artificial Sequence; identical to SEQ ID NO: 1235
  Synthetic

SEQ ID NO: 1259 - DNA, 69 bp, Artificial Sequence
  Synthetic
aacagaagaagggaagttctacctattgatacctttggtggagctgaggagacgatatctagaaccgat

SEQ ID NO: 1260 - DNA, 69 bp, Artificial Sequence; identical to SEQ ID NO: 1259
  Synthetic

SEQ ID NO: 1261 - DNA, 69 bp, Artificial Sequence; identical to SEQ ID NO: 1259
  Synthetic

SEQ ID NO: 1262 - DNA, 69 bp, Artificial Sequence
  Synthetic
gtctcgctcgcccaccgcggggtgctctttctggacgaggccccggagttctcggggaaggcgctggac

SEQ ID NO: 1263 - DNA, 69 bp, Artificial Sequence
  Synthetic
cactacagtatgcagattttgcagcttggcagcgtgaatggctacaaggtgaggcgttagagcaacagc

SEQ ID NO: 1264 - DNA, 68 bp, Artificial Sequence
  Synthetic
tcatcactacttaatatatccataagagaaatttcatttccttctttgtctactcctataggatcttg

SEQ ID NO: 1265 - DNA, 68 bp, Artificial Sequence
  Synthetic
tctggtggcagtgcatttcaaacaccgtggtttggtcaattgatgactgggccacagcttttagctca

SEQ ID NO: 1266 - DNA, 69 bp, Artificial Sequence
  Synthetic
gttttttgtagccattaggcgcatgaggtttacgccattaagccctaaagcgtcattcgtcgaaacagc

SEQ ID NO: 1267 - DNA, 69 bp, Artificial Sequence
  Synthetic
gatcacccaggacgtctgcgccttctacgaggaccatgccctctacgacgcctacacgggcgtggtggt

SEQ ID NO: 1268 - DNA, 68 bp, Artificial Sequence
  Synthetic
gcaaccggcatcagtgtaataccgataatcgtaacaacagagcctgtcacgaccggcggaaaaaacga

SEQ ID NO: 1269 - DNA, 68 bp, Artificial Sequence
  Synthetic
gtgaggatgcgctcggagtcgaccagcgccttggggcatccaagactgacgaagccgactttgggagt

SEQ ID NO: 1270 - DNA, 68 bp, Artificial Sequence
  Synthetic
acaagaccccatcggaacagataaagaaggtaatgaaataagtcttttagatatacttggcacagagg

SEQ ID NO: 1271 - DNA, 69 bp, Artificial Sequence; identical to SEQ ID NO: 1191
  Synthetic

SEQ ID NO: 1272 - DNA, 68 bp, Artificial Sequence
  Synthetic
ccatcataagatgcctttttaccgacgagtatagttgtacatgccattatcagtctcctttacaaacg

SEQ ID NO: 1273 - DNA, 68 bp, Artificial Sequence
  Synthetic
ccactcccaaagtcggcttcgtcagtcttggatgccccaaggcgctggtcgactccgagcgcatcctc

SEQ ID NO: 1274 - DNA, 68 bp, Artificial Sequence
  Synthetic
cactcccaaagtcggcttcgtcagtcttggatgccccaaggcgctggtcgactccgagcgcatcctca

SEQ ID NO: 1275 - DNA, 69 bp, Artificial Sequence
  Synthetic
accagctgtaactttttcggatcaagctatgagggacgcaaagagggaactaaacacttaattggtgtt

SEQ ID NO: 1276 - DNA, 68 bp, Artificial Sequence
  Synthetic
agttcagcccgtggatttgtttccaatgacgcatcatgtggagtgcatagcgttgatacaaagagtga

SEQ ID NO: 1277 - DNA, 69 bp, Artificial Sequence
  Synthetic
agaaatcactcagcaagagttagccaggcgaattggcaaacctaaacaggagattactcgcctatttaa

SEQ ID NO: 1278 - DNA, 69 bp, Artificial Sequence
  Synthetic
cagccgactgatttgtttccgaatacgcatcacgtggagtgcgtagtgttgctacaacgaagcaacggg

SEQ ID NO: 1279 - DNA, 69 bp, Artificial Sequence; identical to SEQ ID NO: 1187
  Synthetic

SEQ ID NO: 1280 - DNA, 68 bp, Artificial Sequence; identical to SEQ ID NO: 1189
  Synthetic

SEQ ID NO: 1281 - DNA, 69 bp, Artificial Sequence
  Synthetic
aaaatgtgtagacatgtttccttatacgacacatgttgagacggtagtgttaatggagagaaagtaaga

SEQ ID NO: 1282 - DNA, 68 bp, Artificial Sequence
  Synthetic
aataacaaactattttttatagaaacatggggatgtcagatgaatgaagaggattccgaaaaattatc

SEQ ID NO: 1283 - DNA, 69 bp, Artificial Sequence; identical to SEQ ID NO: 1199
  Synthetic

SEQ ID NO: 1284 - DNA, 69 bp, Artificial Sequence; identical to SEQ ID NO: 1199
  Synthetic

SEQ ID NO: 1285 - DNA, 69 bp, Artificial Sequence
  Synthetic
taacaccaattaaatgtttagttccctctttgcgtccctcatagcttgatccgaaaaagttacagctgg

SEQ ID NO: 1286 - DNA, 68 bp, Artificial Sequence
  Synthetic
ggtgaggatgcgctcggagtcgaccagcgccttggggcatccaagactgacgaagccgactttgggag

SEQ ID NO: 1287 - DNA, 68 bp, Artificial Sequence
  Synthetic
tttatcccgtaaggacatgaatggtaccacttctaccgcacacgttcccccaatataacttattaata

SEQ ID NO: 1288 - DNA, 68 bp, Artificial Sequence
  Synthetic
tatcccgtaaggacatgaatggtaccacttctaccgcacacgttcccccaatataacttattaatatt

SEQ ID NO: 1289 - DNA, 68 bp, Artificial Sequence; identical to SEQ ID NO: 1222
  Synthetic

SEQ ID NO: 1290 - DNA, 68 bp, Artificial Sequence; identical to SEQ ID NO: 1274
  Synthetic

SEQ ID NO: 1291 - DNA, 69 bp, Artificial Sequence
  Synthetic
gtggatcacctggtttttcgtgttcagatacaggcatacgaagtgctcctgagacagaaagcgcatatc

SEQ ID NO: 1292 - DNA, 69 bp, Artificial Sequence
  Synthetic
tctatttaaattgtctattttattgacaggggaccaaattgaagtggccgctaatcagttccttcaaaa

SEQ ID NO: 1293 - DNA, 69 bp, Artificial Sequence; identical to SEQ ID NO: 1292
  Synthetic

SEQ ID NO: 1294 - DNA, 69 bp, Artificial Sequence
  Synthetic
ccgagctgccgatcaccgagatcgcgttcgcgtccggtttcgccagcgtgcggcagttcaacgacacga

SEQ ID NO: 1295 - DNA, 69 bp, Artificial Sequence; identical to SEQ ID NO: 1267
  Synthetic

SEQ ID NO: 1296 - DNA, 69 bp, Artificial Sequence; identical to SEQ ID NO: 1275
  Synthetic

SEQ ID NO: 1297 - DNA, 69 bp, Artificial Sequence
  Synthetic
actggcgaagcgattcttggtgcgaacattttccgtgatttttttgcgggcatccgtgatgtggtcggc

SEQ ID NO: 1298 - DNA, 68 bp, Artificial Sequence
  Synthetic
ttctaactcacgacacgttgtgctcttaccaaccgcactcgctccctcaaacgctataatccccatag

SEQ ID NO: 1299 - DNA, 68 bp, Artificial Sequence; identical to SEQ ID NO: 1286
  Synthetic

SEQ ID NO: 1300 - DNA, 69 bp, Artificial Sequence
  Synthetic
gctgtggcggttccaaattggtgaggcgccaaatccgacgtccccccatcctgagtagcagtcgggttt

SEQ ID NO: 1301 - DNA, 69 bp, Artificial Sequence
  Synthetic
aaaatctaaattttcttttggcagaccttcttcgctactcgtaatattacctaacacggaacgaaataa

SEQ ID NO: 1302 - DNA, 68 bp, Artificial Sequence; identical to SEQ ID NO: 1183
  Synthetic

SEQ ID NO: 1303 - DNA, 69 bp, Artificial Sequence
  Synthetic
atcacgatggggagcagttcgatgtaccccatctccaggtccttcaccacatagtccgccgccccctgc

SEQ ID NO: 1304 - DNA, 68 bp, Artificial Sequence
  Synthetic
ggttaagtgtatggatatgttcccaaatactccacattgtgagacgtgcgtacttttgtcccacaaaa

SEQ ID NO: 1305 - DNA, 69 bp, Artificial Sequence; identical to SEQ ID NO: 1234
  Synthetic

SEQ ID NO: 1306 - DNA, 68 bp, Artificial Sequence
  Synthetic
cgtttatgaatgacttgatttttggtatgtaaagtataagcagacaaaatgctcctgggataaaaagc

SEQ ID NO: 1307 - DNA, 68 bp, Artificial Sequence
  Synthetic
tcttcaagatccaataggaatagataaagaaggcaatgaaatctctttaatggatgttttaggtacag

SEQ ID NO: 1308 - DNA, 68 bp, Artificial Sequence
  Synthetic
aacagttcctttttcaatgttactgtaacctgatgtgtacctatagcccatccgtcgcgcaatgaaag

SEQ ID NO: 1309 - DNA, 68 bp, Artificial Sequence
  Synthetic
ggggcaaattgctgcgatttgggttggagggggaacgttgattccatgggcgctcattccagctgctg

SEQ ID NO: 1310 - DNA, 69 bp, Artificial Sequence; identical to SEQ ID NO: 1224
  Synthetic

SEQ ID NO: 1311 - DNA, 68 bp, Artificial Sequence; identical to SEQ ID NO: 1229
  Synthetic

SEQ ID NO: 1312 - DNA, 68 bp, Artificial Sequence
  Synthetic
gatgttcgtagcaactatgggaggaaccggtgcaacattagttgttccatttatgtttatgtggttaa

SEQ ID NO: 1313 - DNA, 68 bp, Artificial Sequence; identical to SEQ ID NO: 1229
  Synthetic

SEQ ID NO: 1314 - DNA, 68 bp, Artificial Sequence
  Synthetic
acagtttacagaaagctatggcggtacatgcataaaccatggctgtattccgtctaaagtgcttgtta

SEQ ID NO: 1315 - DNA, 68 bp, Artificial Sequence
  Synthetic
atagaagcacactgatgatgagcaagaccaccaacatttccacaagtgtgaaagctttaaccttagct

SEQ ID NO: 1316 - DNA, 69 bp, Artificial Sequence; identical to SEQ ID NO: 1275
  Synthetic

SEQ ID NO: 1317 - DNA, 68 bp, Artificial Sequence
  Synthetic
ggatttcgttgcactgatgggcggtactggcgcgactttactcgttccttatttatttatatttcttt

SEQ ID NO: 1318 - DNA, 68 bp, Artificial Sequence
  Synthetic
ggatttcattgcactgatgggcggtactggcgcgactttactcgttccttatttatttatatttcttt

SEQ ID NO: 1319 - DNA, 68 bp, Artificial Sequence
  Synthetic
tatatgtcttcatataatcgagcaatgtgttcagatagttgagtccgtataattgtgtaaaaagctag

SEQ ID NO: 1320 - DNA, 68 bp, Artificial Sequence
  Synthetic
gcgcgccgactttatgcaggatcacattgctgggcacttcgaacagaaagtagccgaggaagaagatg

SEQ ID NO: 1321 - DNA, 69 bp, Artificial Sequence
  Synthetic
ttcgttaattggagctacggccattggtggacctcctgaccacccccactcgtaagtcataataattac

SEQ ID NO: 1322 - DNA, 68 bp, Artificial Sequence
  Synthetic
taatgcatacattgtcgttgtcttcccagaaccagtcggtccagtaaacacgagtagcccctgtgaat

SEQ ID NO: 1323 - DNA, 68 bp, Artificial Sequence
  Synthetic
gctctgcaaaagcttgatcgtcggttcaaatccgtctaccgccttttaatattctaaaaaacctagga

SEQ ID NO: 1324 - DNA, 68 bp, Artificial Sequence; identical to SEQ ID NO: 1252
  Synthetic

SEQ ID NO: 1325 - DNA, 68 bp, Artificial Sequence
  Synthetic
atgtacgagtactttagacgggatacaaccgtggttaatgcacgtgccgccatagttatctgatgatt

SEQ ID NO: 1326 - DNA, 69 bp, Artificial Sequence
  Synthetic
atgaagattataataattggaggtggctggtctggatgtgcagcagccataacagctaaaaaggcaggt

SEQ ID NO: 1327 - DNA, 68 bp, Artificial Sequence
  Synthetic
aaccccaaagtcggcttcgtcagccttggctgcccgaaggccctcgtcgattccgagcgcatcctcac

SEQ ID NO: 1328 - DNA, 69 bp, Artificial Sequence
  Synthetic
gaatctaaattttctttcggtaatccttcttcactactcgtaatatttcctaatacagaacgaaataaa

SEQ ID NO: 1329 - DNA, 69 bp, Artificial Sequence
  Synthetic
ctggcttgattaatagtttaaaagtcttggctggtgtcacgaacggtgcaatagtgatccacacccaac

SEQ ID NO: 1330 - DNA, 68 bp, Artificial Sequence; identical to SEQ ID NO: 1274
  Synthetic

SEQ ID NO: 1331 - DNA, 68 bp, Artificial Sequence; identical to SEQ ID NO: 1286
  Synthetic

SEQ ID NO: 1332 - DNA, 68 bp, Artificial Sequence; identical to SEQ ID NO: 1274
  Synthetic

SEQ ID NO: 1333 - DNA, 68 bp, Artificial Sequence; identical to SEQ ID NO: 1304
  Synthetic

SEQ ID NO: 1334 - DNA, 68 bp, Artificial Sequence
  Synthetic
agctttcattgcgcgacggatgggctataggtacacatcaggatacagtaacattgaaaaaggaactg

SEQ ID NO: 1335 - DNA, 69 bp, Artificial Sequence
  Synthetic
cgcatgttcgcggccggcacgctggtcacgctcggcaacccgaagatcatgctgttctatctggcattg

SEQ ID NO: 1336 - DNA, 69 bp, Artificial Sequence
  Synthetic
cgcatgttcgcggccggcacgctggtcacgctcggcaacccgaagatcatgctgttctatctggcgttg

SEQ ID NO: 1337 - DNA, 69 bp, Artificial Sequence
  Synthetic
gggtggaaataatataaaaggtggccttataggtcctggagttcacgcttcacatggtatggagagaac

SEQ ID NO: 1338 - DNA, 68 bp, Artificial Sequence
  Synthetic
ttttcccccgaaaatctttaacaccactatctgttgatgtcccagctcctccaaaaaaaactaaatat

SEQ ID NO: 1339 - DNA, 69 bp, Artificial Sequence; identical to SEQ ID NO: 1236
  Synthetic

SEQ ID NO: 1340 - DNA, 68 bp, Artificial Sequence
  Synthetic
atcttttaactgcaaaagtactacggtctctacatgagctgtttgcgggaacatatcgactggttgca

SEQ ID NO: 1341 - DNA, 68 bp, Artificial Sequence
  Synthetic
taagggcatggacatgtttcctcatacacctcatgtggaaactgtagttaagctaagcaaataatatc

SEQ ID NO: 1342 - DNA, 69 bp, Artificial Sequence
  Synthetic
gctggtggtggatatcggcggtggtacgactgactgttcattgctgctgatgggaccgcagtggcgttc

SEQ ID NO: 1343 - DNA, 69 bp, Artificial Sequence
  Synthetic
ataatcatcaaagagtttaggattatcaaattcactatgatacgcccttccgaaagctgatactaacga

SEQ ID NO: 1344 - DNA, 69 bp, Artificial Sequence; identical to SEQ ID NO: 1275
  Synthetic

SEQ ID NO: 1345 - DNA, 68 bp, Artificial Sequence; identical to SEQ ID NO: 1253
  Synthetic

SEQ ID NO: 1346 - DNA, 69 bp, Artificial Sequence
  Synthetic
agggcctggctgctgaactcgggcgtctcgtcgaggaagaggacgccccggtgggacagggacaccgcg

SEQ ID NO: 1347 - DNA, 68 bp, Artificial Sequence; identical to SEQ ID NO: 1230
  Synthetic

SEQ ID NO: 1348 - DNA, 68 bp, Artificial Sequence
  Synthetic
atggctgttgcgttgatagcgccaagcgttactagtacggcatatgcagtagaaacaacgagtcaaca

SEQ ID NO: 1349 - DNA, 69 bp, Artificial Sequence; identical to SEQ ID NO: 1236
  Synthetic

SEQ ID NO: 1350 - DNA, 68 bp, Artificial Sequence
  Synthetic
attaacaagcactttagatggaatacagccatggtttatgcatgtaccgccatagctttctgtaaatt

SEQ ID NO: 1351 - DNA, 69 bp, Artificial Sequence
  Synthetic
gaccacaatccgcgtgtgggctttgtatcccttgggtgccccaaggcactcgtcgattcggagcagatc

SEQ ID NO: 1352 - DNA, 68 bp, Artificial Sequence
  Synthetic
ttcgacgaatgatgctttagggctgaatggagtaaacctcatgcgcctaatggctacaaaaaacatct

SEQ ID NO: 1353 - DNA, 68 bp, Artificial Sequence
  Synthetic
caaaaattgcagtgcgttcagcgatgacaggacatttgatcgcttcgacgatgcatacgaaagacgct

SEQ ID NO: 1354 - DNA, 68 bp, Artificial Sequence
  Synthetic
aattttcttgtcgattggctattcgacttgtcattggtgtcatgtgatggagagagaatcttttgagg

SEQ ID NO: 1355 - DNA, 68 bp, Artificial Sequence
  Synthetic
ttttaaaatgattaaaggcggcgttccaataagcgtacccaagcccccaatagtgccggcataaccga

SEQ ID NO: 1356 - DNA, 68 bp, Artificial Sequence
  Synthetic
gggtgaggatgcgctcggaatcgacaagggccttcgggcagccaaggctgacgaagccgactttgggg

SEQ ID NO: 1357 - DNA, 68 bp, Artificial Sequence
  Synthetic
agcaacccccctgctgttgggcttaacgtgcttctcgatgaaagtgatactgagcctgagaaattaga

SEQ ID NO: 1358 - DNA, 68 bp, Artificial Sequence; identical to SEQ ID NO: 1272
  Synthetic

SEQ ID NO: 1359 - DNA, 68 bp, Artificial Sequence
  Synthetic
ccagatcagtgcgcccccggcggtccagagcaggaagcggacatggcccatgcggaagaggcccgctg

SEQ ID NO: 1360 - DNA, 69 bp, Artificial Sequence; identical to SEQ ID NO: 1199
  Synthetic

SEQ ID NO: 1361 - DNA, 68 bp, Artificial Sequence; identical to SEQ ID NO: 1308
  Synthetic

SEQ ID NO: 1362 - DNA, 68 bp, Artificial Sequence
  Synthetic
gtgaatgatttggtttttaatatttaaaaaaagaacaacaaaatgttcctgattaagtgaagtcatgt

SEQ ID NO: 1363 - DNA, 69 bp, Artificial Sequence; identical to SEQ ID NO: 1291
  Synthetic

SEQ ID NO: 1364 - DNA, 69 bp, Artificial Sequence
  Synthetic
actttttatattgcaaaaaataaatggcggacgaggtatcaggatacctcatctgccaattaaaatttg

SEQ ID NO: 1365 - DNA, 69 bp, Artificial Sequence
  Synthetic
taacaccaattaagtgtttagttccctctttgcgtccctcatagcttgaaccgaaaaagttacagctgg

SEQ ID NO: 1366 - DNA, 68 bp, Artificial Sequence
  Synthetic
agataaaacactctccaggaaacccggggcggttcagatggcgcactcatcaccggactgacctttct

SEQ ID NO: 1367 - DNA, 68 bp, Artificial Sequence
  Synthetic
atatgttcccgcaaacagctcacgttgagacggtagtacttttgcagttaaaagataaataaaggact

SEQ ID NO: 1368 - DNA, 68 bp, Artificial Sequence; identical to SEQ ID NO: 1367
  Synthetic

SEQ ID NO: 1369 - DNA, 69 bp, Artificial Sequence; identical to SEQ ID NO: 1234
  Synthetic

SEQ ID NO: 1370 - DNA, 68 bp, Artificial Sequence
  Synthetic
tgttaaccacataaacataaatggtacaactaatgtggcacctgtaccacccatagttaccacgaaca

SEQ ID NO: 1371 - DNA, 68 bp, Artificial Sequence
  Synthetic
aaatgttcgttgcaactatggggggtaccggtgctacattagtcgttccatttatgtttatgtggtta

SEQ ID NO: 1372 - DNA, 68 bp, Artificial Sequence
  Synthetic
ataatgcaacatagtctccagtaccacctttatatgcaccagcagttgctgaaaaatctatatttgtt

SEQ ID NO: 1373 - DNA, 69 bp, Artificial Sequence; identical to SEQ ID NO: 1275
  Synthetic

SEQ ID NO: 1374 - DNA, 69 bp, Artificial Sequence; identical to SEQ ID NO: 1234
  Synthetic

SEQ ID NO: 1375 - DNA, 68 bp, Artificial Sequence
  Synthetic
atgaattaatgttttagtaggtatacatccgatattaatgcatgtaccaccatacatctttgttgatt

SEQ ID NO: 1376 - DNA, 68 bp, Artificial Sequence
  Synthetic
agctgcgcgcgcagtatttctcgaaggagcccatggatccggacgtatccatcatggcgataatgacc

SEQ ID NO: 1377 - DNA, 68 bp, Artificial Sequence
  Synthetic
tcatcactacttaatatatccataagagaaatttcatttccttctttatctactcctataggatcttg

SEQ ID NO: 1378 - DNA, 69 bp, Artificial Sequence
  Synthetic
aaccagctgtaactttttcggttcaagctatgagggacgcaaagagggaactaaacacttaattggtgt

SEQ ID NO: 1379 - DNA, 69 bp, Artificial Sequence; identical to SEQ ID NO: 1234
  Synthetic

SEQ ID NO: 1380 - DNA, 68 bp, Artificial Sequence
  Synthetic
atgaaggacttgatttttagtattgagataaagacaaacgaaattttcctgttgtaaaaacctcatat

SEQ ID NO: 1381 - DNA, 69 bp, Artificial Sequence
  Synthetic
tccccgtgtcggcggttcgattccgtccctgggcaccatgaatacgacgaaaaggctcacctccgggtg

SEQ ID NO: 1382 - DNA, 69 bp, Artificial Sequence; identical to SEQ ID NO: 1381
  Synthetic

SEQ ID NO: 1383 - DNA, 69 bp, Artificial Sequence; identical to SEQ ID NO: 1234
  Synthetic

SEQ ID NO: 1384 - DNA, 68 bp, Artificial Sequence; identical to SEQ ID NO: 1286
  Synthetic

SEQ ID NO: 1385 - DNA, 69 bp, Artificial Sequence
  Synthetic
gagttctctccataccatgcgaagcgtgaactccaggacctataaggccaccttttatattatttccac

SEQ ID NO: 1386 - DNA, 69 bp, Artificial Sequence
  Synthetic
gaaagtttttctgaatcctcttcattcatttggcaaccccaggtttctatgaaaaattcacctataaca

SEQ ID NO: 1387 - DNA, 68 bp, Artificial Sequence
  Synthetic
agcctctgtgccaagtatatctaaaagacttatttcattaccttctttatctgttccgatagggtctt

SEQ ID NO: 1388 - DNA, 68 bp, Artificial Sequence
  Synthetic
aggcagatcacctgtaacccttcgattattcttggtggagcggaggaggatcgaactcccgaccttcg

SEQ ID NO: 1389 - DNA, 69 bp, Artificial Sequence; identical to SEQ ID NO: 1224
  Synthetic

SEQ ID NO: 1390 - DNA, 69 bp, Artificial Sequence; identical to SEQ ID NO: 1235
  Synthetic

SEQ ID NO: 1391 - DNA, 68 bp, Artificial Sequence; identical to SEQ ID NO: 1205
  Synthetic

SEQ ID NO: 1392 - DNA, 68 bp, Artificial Sequence; identical to SEQ ID NO: 1221
  Synthetic

SEQ ID NO: 1393 - DNA, 68 bp, Artificial Sequence
  Synthetic
gtattattaggggtgtttgcaatcggggcaccaggagtccctggggggacagtaatggcatcattagg

SEQ ID NO: 1394 - DNA, 69 bp, Artificial Sequence
  Synthetic
gaagagcaccgagcgcaggaagagcgtgtactgctcccacgccgtccactccgtgatgcgccggtccga

SEQ ID NO: 1395 - DNA, 69 bp, Artificial Sequence; identical to SEQ ID NO: 1257
  Synthetic

SEQ ID NO: 1396 - DNA, 69 bp, Artificial Sequence; identical to SEQ ID NO: 1278
  Synthetic

SEQ ID NO: 1397 - DNA, 69 bp, Artificial Sequence; identical to SEQ ID NO: 1234
  Synthetic

SEQ ID NO: 1398 - DNA, 68 bp, Artificial Sequence; identical to SEQ ID NO: 1276
  Synthetic

SEQ ID NO: 1399 - DNA, 69 bp, Artificial Sequence; identical to SEQ ID NO: 1188
  Synthetic

SEQ ID NO: 1400 - DNA, 69 bp, Artificial Sequence
  Synthetic
gtaacaccaattaagtgtttagttccctctttgcgtccctcatagcttgatccgaaaaagttacagctg

SEQ ID NO: 1401 - DNA, 69 bp, Artificial Sequence; identical to SEQ ID NO: 1180
  Synthetic

SEQ ID NO: 1402 - DNA, 68 bp, Artificial Sequence; identical to SEQ ID NO: 1388
  Synthetic

SEQ ID NO: 1403 - DNA, 69 bp, Artificial Sequence
  Synthetic
agcaggatggagataacgagcatgacgactaacatttctatcagtgtaaatcccttttcattcacagtt

SEQ ID NO: 1404 - DNA, 69 bp, Artificial Sequence; identical to SEQ ID NO: 1243
  Synthetic

SEQ ID NO: 1405 - DNA, 68 bp, Artificial Sequence; identical to SEQ ID NO: 1196
  Synthetic

SEQ ID NO: 1406 - DNA, 68 bp, Artificial Sequence
  Synthetic
tttaaattttgtcctttcttcccgctatacccgcttggcattgtaaaagataaatagttcgcccactc

SEQ ID NO: 1407 - DNA, 68 bp, Artificial Sequence; identical to SEQ ID NO: 1348
  Synthetic

SEQ ID NO: 1408 - DNA, 68 bp, Artificial Sequence
  Synthetic
ccaaatattaaattctgcagtaggcgtccaatttccaaaggttcctccacccataattgttatagaat

SEQ ID NO: 1409 - DNA, 68 bp, Artificial Sequence; identical to SEQ ID NO: 1181
  Synthetic

SEQ ID NO: 1410 - DNA, 69 bp, Artificial Sequence
  Synthetic
tttgcgagactacggatctggatctcgtcccactgctggcgcggtcccgcgatatcgcgccgcaggtac

SEQ ID NO: 1411 - DNA, 68 bp, Artificial Sequence
  Synthetic
agaaaagcacgctgataatcagcaagaccaccaacatttccacaagtgtaaaagctttaaccttcgct

SEQ ID NO: 1412 - DNA, 69 bp, Artificial Sequence
  Synthetic
acaccagaaatcaaggagtcttaccagtatggaaatgaaaatacaagcttctttaccagtatgattccg

SEQ ID NO: 1413 - DNA, 68 bp, Artificial Sequence
  Synthetic
atgtacgagtactttagagggtatacagccgtggtttatgcatgtgccgccaaagttgtctgaggatt

SEQ ID NO: 1414 - DNA, 68 bp, Artificial Sequence; identical to SEQ ID NO: 1253
  Synthetic

SEQ ID NO: 1415 - DNA, 69 bp, Artificial Sequence
  Synthetic
tgtaacacttcatttttgacgttcagaaacagcacgacgaaatgttcctggttcaatgacgacatatct

SEQ ID NO: 1416 - DNA, 68 bp, Artificial Sequence
  Synthetic
gcttctggacgcgggttcgattcccgccgcctccaccacccaacaccccggaaagcccttgttttaca

SEQ ID NO: 1417 - DNA, 68 bp, Artificial Sequence; identical to SEQ ID NO: 1416
  Synthetic

SEQ ID NO: 1418 - DNA, 69 bp, Artificial Sequence; identical to SEQ ID NO: 1400
  Synthetic

SEQ ID NO: 1419 - DNA, 68 bp, Artificial Sequence
  Synthetic
accgtaaaataacatttctgtttttccagccccgcacacagcccaaataaaaaaagattttttctgct

SEQ ID NO: 1420 - DNA, 68 bp, Artificial Sequence
  Synthetic
gaatgatgcgttggggcttaatggagtaaatctaatgcgcctaatggctacaaaagacatctactttg

SEQ ID NO: 1421 - DNA, 69 bp, Artificial Sequence; identical to SEQ ID NO: 1201
  Synthetic

SEQ ID NO: 1422 - DNA, 69 bp, Artificial Sequence
  Synthetic
ttcggacgcgggttcaactcccgccagctccaccaaatattgatgtactgaagttcagtaaagtctact

SEQ ID NO: 1423 - DNA, 68 bp, Artificial Sequence
  Synthetic
aatttttaaaaaaagtcgacaagcatttactctaattgaagcagcaattgtgcttttcattattagtt

SEQ ID NO: 1424 - DNA, 68 bp, Artificial Sequence
  Synthetic
agagaagttgccggaagcatggttctagtttctttggaagaaaagaaggaacgaaggagttaacgcgt

SEQ ID NO: 1425 - DNA, 69 bp, Artificial Sequence
  Synthetic
cacctggcgtggcgaagtgcgcagtctggaagcactaaatagctgcgcggaatagtagatcactttgag

SEQ ID NO: 1426 - DNA, 68 bp, Artificial Sequence
  Synthetic
ataacgcatacattgttgttgtttttccagatccagttggtcctgtaaatataagcaatccatgtgag

SEQ ID NO: 1427 - DNA, 68 bp, Artificial Sequence
  Synthetic
tatgttcaggtttgatcattttccaaaaacgtatcaaagcgtgtgtgttcaacgtttttttcttttcc

SEQ ID NO: 1428 - DNA, 68 bp, Artificial Sequence; identical to SEQ ID NO: 1427
  Synthetic

SEQ ID NO: 1429 - DNA, 69 bp, Artificial Sequence; identical to SEQ ID NO: 1235
  Synthetic

SEQ ID NO: 1430 - DNA, 69 bp, Artificial Sequence; identical to SEQ ID NO: 1365
  Synthetic

SEQ ID NO: 1431 - DNA, 69 bp, Artificial Sequence; identical to SEQ ID NO: 1400
  Synthetic

SEQ ID NO: 1432 - DNA, 69 bp, Artificial Sequence; identical to SEQ ID NO: 1191
  Synthetic

SEQ ID NO: 1433 - DNA, 68 bp, Artificial Sequence
  Synthetic
tatgcaaccagtcgatatgttcccgcaaacagctcatgtagagaccgtagtacttttgcagttaaaag

SEQ ID NO: 1434 - DNA, 69 bp, Artificial Sequence
  Synthetic
aaccagctgtaactttttcggatcaagctatgagggacgcaaagagggaactaaacatttaattggtgt

SEQ ID NO: 1435 - DNA, 69 bp, Artificial Sequence
  Synthetic
aaccagctgtaactttttcggatcaagttatgatggacgtaaagagggaacaaagcacctaataggtgt

SEQ ID NO: 1436 - DNA, 69 bp, Artificial Sequence; identical to SEQ ID NO: 1365
  Synthetic

SEQ ID NO: 1437 - DNA, 69 bp, Artificial Sequence
  Synthetic
ataatcatcaaagattttaggattatcaaattcactatgatacgcccttccgaaagctgatactaacga

SEQ ID NO: 1438 - DNA, 68 bp, Artificial Sequence
  Synthetic
catctttactttgctcttttctcgaatttcagcatctgcgtgtctcataacgtatttatgcgctacag

SEQ ID NO: 1439 - DNA, 69 bp, Artificial Sequence; identical to SEQ ID NO: 1231
  Synthetic

SEQ ID NO: 1440 - DNA, 68 bp, Artificial Sequence
  Synthetic
agctaagtgtcctaattggcccccgatcccggtttcaatagtttggggaatctttgtaagtggtaagc

SEQ ID NO: 1441 - DNA, 68 bp, Artificial Sequence
  Synthetic
cggccttccacttacaaaaattccgcagacaattgaaaccgggatcgggggccaattaggacacttag

SEQ ID NO: 1442 - DNA, 68 bp, Artificial Sequence
  Synthetic
gtagatgttttttgttgccattaggcgcatgaggtttactccattaagccctaaagcatcattcgtcg

SEQ ID NO: 1443 - DNA, 69 bp, Artificial Sequence
  Synthetic
aatatgttttgtcgccattaaacgcataaggtttacaccattaaggccaagagcatcatttgttgaaac

SEQ ID NO: 1444 - DNA, 69 bp, Artificial Sequence; identical to SEQ ID NO: 1443
  Synthetic

SEQ ID NO: 1445 - DNA, 69 bp, Artificial Sequence
  Synthetic
cgtcgttagtatcagctttcggaagggcgtatcatagtgaatttgataatcctaaaatctttgatgatt

SEQ ID NO: 1446 - DNA, 68 bp, Artificial Sequence
  Synthetic
gcgcgtgatattgcgacgtattttaatcatacattcggcacgacatttacacttccgaagtatgtcat

SEQ ID NO: 1447 - DNA, 69 bp, Artificial Sequence
  Synthetic
gttttttgttgccattaggcgcatgaggttgacgccattaagccctagagcatcattcgtcgaaacagc

SEQ ID NO: 1448 - DNA, 69 bp, Artificial Sequence
  Synthetic
attgattctacaacagaagttggcatactagaaactagtactttaagagcaccaaaaataaataatgta

SEQ ID NO: 1449 - DNA, 68 bp, Artificial Sequence
  Synthetic
catctttactttgctcttctctcgaatttcagcatctgcatggcgcatcacatatttatgcgctacag

SEQ ID NO: 1450 - DNA, 69 bp, Artificial Sequence
  Synthetic
aaaattaacaagctaataatgaacaagacaatcgtcatttccaccagggtaaagcccttggccacccgt

SEQ ID NO: 1451 - DNA, 68 bp, Artificial Sequence
  Synthetic
tttgttgactcgttgtttctactgcatatgccgtactagtaacgcttggcgctatcaacgcaacagcc

SEQ ID NO: 1452 - DNA, 69 bp, Artificial Sequence; identical to SEQ ID NO: 1199
  Synthetic

SEQ ID NO: 1453 - DNA, 69 bp, Artificial Sequence; identical to SEQ ID NO: 1224
  Synthetic

SEQ ID NO: 1454 - DNA, 69 bp, Artificial Sequence; identical to SEQ ID NO: 1199
  Synthetic

SEQ ID NO: 1455 - DNA, 68 bp, Artificial Sequence
  Synthetic
cgcgacaccagcctcgtcgtggtcccgcagttccacgtcaacgcctggggcctgccgcacgcggtgtt

SEQ ID NO: 1456 - DNA, 68 bp, Artificial Sequence
  Synthetic
gtgtcggcagccctgcaggtcggatatcgcagcatcgacaccgccaagatctacgacaacgaggcggg

SEQ ID NO: 1457 - DNA, 69 bp, Artificial Sequence
  Synthetic
tccgcagcaatatcttcatacaaatcggcaataggatctccttttgcctggatataagtggcagtgaat

SEQ ID NO: 1458 - DNA, 69 bp, Artificial Sequence; identical to SEQ ID NO: 1236
  Synthetic

SEQ ID NO: 1459 - DNA, 69 bp, Artificial Sequence; identical to SEQ ID NO: 1275
  Synthetic

SEQ ID NO: 1460 - DNA, 68 bp, Artificial Sequence; identical to SEQ ID NO: 1181
  Synthetic

SEQ ID NO: 1461 - DNA, 69 bp, Artificial Sequence; identical to SEQ ID NO: 1275
  Synthetic

SEQ ID NO: 1462 - DNA, 69 bp, Artificial Sequence
  Synthetic
tatgcaacccgtcgatatgttcccgcaaacagctcacgtggaaactgtagtactcttgcagttaaaaga

SEQ ID NO: 1463 - DNA, 68 bp, Artificial Sequence
  Synthetic
tcgtttcaatatgtccgtacatggaataataaagcaccagaactttagccatttctaaccactcctcg

SEQ ID NO: 1464 - DNA, 68 bp, Artificial Sequence
  Synthetic
cgaacatctataaattctgtattggtagaaacatcacaggtgctttccctcctggtgaacagtacaac

SEQ ID NO: 1465 - DNA, 69 bp, Artificial Sequence
  Synthetic
atagtattagctggcggatgtgcaactggcacatggtatcgagctggggaaggattaattggtagttgg

SEQ ID NO: 1466 - DNA, 68 bp, Artificial Sequence
  Synthetic
cgacaaggacaccacgctcgtcgtggtccctcaattccacgtgaacgcctggggcctgccgcacgcca

SEQ ID NO: 1467 - DNA, 69 bp, Artificial Sequence; identical to SEQ ID NO: 1204
  Synthetic

SEQ ID NO: 1468 - DNA, 69 bp, Artificial Sequence
  Synthetic
ctgtgccgcccgagtgatctgcgtgcacaatcatcccagcggcagtccccaaccttcgcaggcggatat

SEQ ID NO: 1469 - DNA, 68 bp, Artificial Sequence; identical to SEQ ID NO: 1348
  Synthetic

SEQ ID NO: 1470 - DNA, 68 bp, Artificial Sequence; identical to SEQ ID NO: 1420
  Synthetic

SEQ ID NO: 1471 - DNA, 69 bp, Artificial Sequence; identical to SEQ ID NO: 1224
  Synthetic

SEQ ID NO: 1472 - DNA, 69 bp, Artificial Sequence
  Synthetic
atagaaatagacctttccactggccaaggagctgataaaaccatgcaacaagttttaagtaaaagtgca

SEQ ID NO: 1473 - DNA, 68 bp, Artificial Sequence
  Synthetic
ttgatatgatattttataacggttaatatatttataaaacaacgggcgtgttatacgcccgtttcaat

SEQ ID NO: 1474 - DNA, 68 bp, Artificial Sequence; identical to SEQ ID NO: 1197
  Synthetic

SEQ ID NO: 1475 - DNA, 68 bp, Artificial Sequence
  Synthetic
gatagtgatcgaatatattcatggtatgccgtcctttcgttttttagcacaggttaagagccgttcat

SEQ ID NO: 1476 - DNA, 68 bp, Artificial Sequence
  Synthetic
cccgaaggatgctccccgctccaccaccgtttatgacccgacctgtggatctggttcgctgttgatca

SEQ ID NO: 1477 - DNA, 68 bp, Artificial Sequence
  Synthetic
aatgtttatcgttacttttggaggtacgggtgcaacattggtcgtcccgttcatgtttatgtggatga

SEQ ID NO: 1478 - DNA, 68 bp, Artificial Sequence
  Synthetic
taactcacgacacgttgtgctcttaccaaccgcacttgctccctcaaacgctataatccccatagttt

SEQ ID NO: 1479 - DNA, 68 bp, Artificial Sequence; identical to SEQ ID NO: 1252
  Synthetic

SEQ ID NO: 1480 - DNA, 68 bp, Artificial Sequence; identical to SEQ ID NO: 1433
  Synthetic

SEQ ID NO: 1481 - DNA, 68 bp, Artificial Sequence
  Synthetic
gcaaccggcatcaatgtaataccgataatcgtaacaacagagcctgtcacgaccggcggaaaaaacga

SEQ ID NO: 1482 - DNA, 69 bp, Artificial Sequence
  Synthetic
aagaacactaataatcagcaaaacaactagcatttcaatcagcgtaaaagcttttactttgagtgtacg

SEQ ID NO: 1483 - DNA, 69 bp, Artificial Sequence
  Synthetic
gagagagtagagtgttgttgtcttgccagacccagttggaccggtcagaattattaatccgtgtgcatg

SEQ ID NO: 1484 - DNA, 68 bp, Artificial Sequence
  Synthetic
cttgtaaaacaagggctttccggggtattgggtggtggaggcggcgggaatcgaacccgcgtccagaa

SEQ ID NO: 1485 - DNA, 68 bp, Artificial Sequence; identical to SEQ ID NO: 1484
  Synthetic

SEQ ID NO: 1486 - DNA, 68 bp, Artificial Sequence; identical to SEQ ID NO: 1274
  Synthetic

SEQ ID NO: 1487 - DNA, 68 bp, Artificial Sequence; identical to SEQ ID NO: 1274
  Synthetic

SEQ ID NO: 1488 - DNA, 69 bp, Artificial Sequence
  Synthetic
atgatctgctccgaatcgacgagtgccttggggcacccaagggatacaaagcccacacgcggattgtgg

SEQ ID NO: 1489 - DNA, 69 bp, Artificial Sequence; identical to SEQ ID NO: 1224
  Synthetic

SEQ ID NO: 1490 - DNA, 68 bp, Artificial Sequence
  Synthetic
aaagctaaggttaaagcttttacattgattgaaatgttggtggtcttgctgattatcagcgtgctttt

SEQ ID NO: 1491 - DNA, 69 bp, Artificial Sequence
  Synthetic
tagatacacctgcaatttgttgtaatggcacttatttgtatgattatcaggcaaaaaaggttttagaat

SEQ ID NO: 1492 - DNA, 69 bp, Artificial Sequence
  Synthetic
tcgtacgccggggagacgacgttcgccgcgatgttgaccgagagcgtggcgacgaggacggtcaccagg

SEQ ID NO: 1493 - DNA, 68 bp, Artificial Sequence; identical to SEQ ID NO: 1317
  Synthetic

SEQ ID NO: 1494 - DNA, 68 bp, Artificial Sequence
  Synthetic
agtacaaccagtcgatttattcccacaaacacatcatgtggaattagtggcgctattagcacctaagg

SEQ ID NO: 1495 - DNA, 68 bp, Artificial Sequence; identical to SEQ ID NO: 1494
  Synthetic

SEQ ID NO: 1496 - DNA, 69 bp, Artificial Sequence
  Synthetic
acataaaaatatagattttccagggcataatcatgcatggctatatgatgtgaataaaatagaacccga

SEQ ID NO: 1497 - DNA, 69 bp, Artificial Sequence; identical to SEQ ID NO: 1224
  Synthetic

SEQ ID NO: 1498 - DNA, 68 bp, Artificial Sequence
  Synthetic
ggttaagtgtatggatatgttcccaaatacgccacattgtgagactgtagttaaacttattagagaat

SEQ ID NO: 1499 - DNA, 68 bp, Artificial Sequence; identical to SEQ ID NO: 1498
  Synthetic

SEQ ID NO: 1500 - DNA, 68 bp, Artificial Sequence
  Synthetic
aaagcgaatggcaagctcaggccactcggcattccgagcctgcgggatcggatcgtgcagcgggctat

SEQ ID NO: 1501 - DNA, 68 bp, Artificial Sequence
  Synthetic
taagaagaaagactctttttttatttgggctgtgtgcggggctggaaaaactgaaatgctattttacg

SEQ ID NO: 1502 - DNA, 69 bp, Artificial Sequence
  Synthetic
gactgcgcctctaaagatttcccttggatgagctaccgattgacttaatcccccaacaaaagtcgtttc

SEQ ID NO: 1503 - DNA, 68 bp, Artificial Sequence
  Synthetic
tcacacaattgaccaactattagtaactcacgcagatactgatcatatgggggatatcgaagtggttg

SEQ ID NO: 1504 - DNA, 68 bp, Artificial Sequence; identical to SEQ ID NO: 1503
  Synthetic

SEQ ID NO: 1505 - DNA, 68 bp, Artificial Sequence
  Synthetic
ccatcataagatgcctttttaccgacgagtatagttgtacatgccattatcggtctcctttacaaacg

SEQ ID NO: 1506 - DNA, 68 bp, Artificial Sequence; identical to SEQ ID NO: 1272
  Synthetic

SEQ ID NO: 1507 - DNA, 68 bp, Artificial Sequence; identical to SEQ ID NO: 1272
  Synthetic

SEQ ID NO: 1508 - DNA, 69 bp, Artificial Sequence; identical to SEQ ID NO: 1251
  Synthetic

SEQ ID NO: 1509 - DNA, 69 bp, Artificial Sequence
  Synthetic
acctccgcgcggtcgcgccgcgtgcggtcgttcacccaggggtccggcaggaacagccgccagttgacg

SEQ ID NO: 1510 - DNA, 68 bp, Artificial Sequence; identical to SEQ ID NO: 1230
  Synthetic

SEQ ID NO: 1511 - DNA, 68 bp, Artificial Sequence
  Synthetic
aaaatatttagttttctttggaggagctgggacatcaacggatagcggtgttaaagattttcggggaa

SEQ ID NO: 1512 - DNA, 68 bp, Artificial Sequence
  Synthetic
aacagttcctttttcaatgttactgtatcctgatgtgtacctatagcccatccgtcgcgcaatgaaag

SEQ ID NO: 1513 - DNA, 69 bp, Artificial Sequence; identical to SEQ ID NO: 1378
  Synthetic

SEQ ID NO: 1514 - DNA, 68 bp, Artificial Sequence
  Synthetic
aagtgtaatatgtttgggtatggggaagtgaatcagtacaatcgccacagtacacttatgtcagccta

SEQ ID NO: 1515 - DNA, 68 bp, Artificial Sequence
  Synthetic
aatgagctaaaagctgtggcccagtcatcaattgaccaaaccatggtgtttgaaatgcactgccgcca

SEQ ID NO: 1516 - DNA, 68 bp, Artificial Sequence; identical to SEQ ID NO: 1228
  Synthetic

SEQ ID NO: 1517 - DNA, 68 bp, Artificial Sequence
  Synthetic
acaatcgtcagataattttggcggtacatgcataaatcacggctgtatcccctctaaagtgctcgtgc

SEQ ID NO: 1518 - DNA, 69 bp, Artificial Sequence; identical to SEQ ID NO: 1275
  Synthetic

SEQ ID NO: 1519 - DNA, 68 bp, Artificial Sequence
  Synthetic
accgtaaaatagcatttcagtttttccagccccgcacacagcccaaataaaaaaagagtctttcttct

SEQ ID NO: 1520 - DNA, 69 bp, Artificial Sequence
  Synthetic
agcaacgccagatagaacagcatgatcttcgggttgccgagcgtgaccagcgtgccggccgcgaacatg

SEQ ID NO: 1521 - DNA, 68 bp, Artificial Sequence
  Synthetic
agctttcattgcgcgacggatgggctataggtacacatcaggttacagtaacattgaaaaaggaactg

SEQ ID NO: 1522 - DNA, 69 bp, Artificial Sequence; identical to SEQ ID NO: 1437
  Synthetic

SEQ ID NO: 1523 - DNA, 69 bp, Artificial Sequence
  Synthetic
ataatcatcaaagattttcggattatcaaattcactatgatatgccctgctgaaagctgatactaacga

SEQ ID NO: 1524 - DNA, 68 bp, Artificial Sequence; identical to SEQ ID NO: 1340
  Synthetic

SEQ ID NO: 1525 - DNA, 68 bp, Artificial Sequence; identical to SEQ ID NO: 1340
  Synthetic

SEQ ID NO: 1526 - DNA, 68 bp, Artificial Sequence; identical to SEQ ID NO: 1375
  Synthetic

SEQ ID NO: 1527 - DNA, 68 bp, Artificial Sequence; identical to SEQ ID NO: 1325
  Synthetic

SEQ ID NO: 1528 - DNA, 68 bp, Artificial Sequence
  Synthetic
atttaacatcaatgaacctgaacccatggttggatcaaaaacactaaagaatcgtcgttctttttgat

SEQ ID NO: 1529 - DNA, 68 bp, Artificial Sequence; identical to SEQ ID NO: 1528
  Synthetic

SEQ ID NO: 1530 - DNA, 69 bp, Artificial Sequence
  Synthetic
atttatttcgttccgtgttaggtaatattacgagtagcgaagaaggtctgccaaaagaaaatttagatt

SEQ ID NO: 1531 - DNA, 68 bp, Artificial Sequence; identical to SEQ ID NO: 1274
  Synthetic

SEQ ID NO: 1532 - DNA, 68 bp, Artificial Sequence; identical to SEQ ID NO: 1274
  Synthetic

SEQ ID NO: 1533 - DNA, 68 bp, Artificial Sequence
  Synthetic
ccatcataagatgcctttttaccgacaagtatagttgtacatgccattatcagtctcctttacaaacg

SEQ ID NO: 1534 - DNA, 68 bp, Artificial Sequence; identical to SEQ ID NO: 1505
  Synthetic

SEQ ID NO: 1535 - DNA, 68 bp, Artificial Sequence; identical to SEQ ID NO: 1272
  Synthetic

SEQ ID NO: 1536 - DNA, 68 bp, Artificial Sequence; identical to SEQ ID NO: 1200
  Synthetic

SEQ ID NO: 1537 - DNA, 69 bp, Artificial Sequence
  Synthetic
gaaactatggggattatagcgtttgagggagcaagtgcggttggtaagagcacaacgtgtcgtgagtta

SEQ ID NO: 1538 - DNA, 69 bp, Artificial Sequence
  Synthetic
gaagggaataatagctctgttttgcctgctccacaaactgcccaaatcaaatattccgacagccctggt

SEQ ID NO: 1539 - DNA, 69 bp, Artificial Sequence; identical to SEQ ID NO: 1351
  Synthetic

SEQ ID NO: 1540 - DNA, 69 bp, Artificial Sequence
  Synthetic
gcgaacgccactgcggccccatcagcagcaatgaacagtcagtcgtaccaccgccgatatccaccacca

SEQ ID NO: 1541 - DNA, 69 bp, Artificial Sequence
  Synthetic
gcgaacgccactgcggtcccatcagcagcaatgaacagtcagtcgtaccaccgccgatatccaccacca

SEQ ID NO: 1542 - DNA, 68 bp, Artificial Sequence
  Synthetic
gctgccgatcaccgagatcgcgttcgcgtccggcttcgccagcgtgcggcagttcaacgacacgatcc

SEQ ID NO: 1543 - DNA, 69 bp, Artificial Sequence; identical to SEQ ID NO: 1245
  Synthetic

SEQ ID NO: 1544 - DNA, 69 bp, Artificial Sequence; identical to SEQ ID NO: 1245
  Synthetic

SEQ ID NO: 1545 - DNA, 68 bp, Artificial Sequence; identical to SEQ ID NO: 1286
  Synthetic

SEQ ID NO: 1546 - DNA, 68 bp, Artificial Sequence; identical to SEQ ID NO: 1286
  Synthetic

SEQ ID NO: 1547 - DNA, 69 bp, Artificial Sequence
  Synthetic
gtcttctggaccatgatgcgctacttccgaaatttcaaaaagatcagtggtcaaacggctcattaattt

SEQ ID NO: 1548 - DNA, 68 bp, Artificial Sequence
  Synthetic
gtggatcacctggtttttcgtgttcagatacaggcatacgaagtgctcctgagacagaaagcgcatat

SEQ ID NO: 1549 - DNA, 69 bp, Artificial Sequence; identical to SEQ ID NO: 1285
  Synthetic

SEQ ID NO: 1550 - DNA, 69 bp, Artificial Sequence; identical to SEQ ID NO: 1365
  Synthetic

SEQ ID NO: 1551 - DNA, 69 bp, Artificial Sequence; identical to SEQ ID NO: 1199
  Synthetic

SEQ ID NO: 1552 - DNA, 69 bp, Artificial Sequence; identical to SEQ ID NO: 1199
  Synthetic

SEQ ID NO: 1553 - DNA, 68 bp, Artificial Sequence
  Synthetic
tacaaagtagatgtcttttgtagccattaggcgcattagatttactccattaagccccaacgcatcat

SEQ ID NO: 1554 - DNA, 69 bp, Artificial Sequence
  Synthetic
tacccgttgcttcgttgtagcaacactacgcactccacgtgatgcgtatttggaaataaatcagccggc

SEQ ID NO: 1555 - DNA, 69 bp, Artificial Sequence; identical to SEQ ID NO: 1554
  Synthetic

SEQ ID NO: 1556 - DNA, 69 bp, Artificial Sequence
  Synthetic
tatcttttaactgcaagagtactacagtttccacgtgagctgtttgcgggaacatatcgacgggttgca

SEQ ID NO: 1557 - DNA, 69 bp, Artificial Sequence; identical to SEQ ID NO: 1236
  Synthetic

SEQ ID NO: 1558 - DNA, 69 bp, Artificial Sequence; identical to SEQ ID NO: 1236
  Synthetic

SEQ ID NO: 1559 - DNA, 69 bp, Artificial Sequence; identical to SEQ ID NO: 1235
  Synthetic

SEQ ID NO: 1560 - DNA, 69 bp, Artificial Sequence; identical to SEQ ID NO: 1235
  Synthetic

SEQ ID NO: 1561 - DNA, 68 bp, Artificial Sequence
  Synthetic
tcccttaggtgctaatagcgccactaattccacatgatgtgtttgtgggaataaatcgactggttgta

SEQ ID NO: 1562 - DNA, 68 bp, Artificial Sequence; identical to SEQ ID NO: 1561
  Synthetic

SEQ ID NO: 1563 - DNA, 68 bp, Artificial Sequence
  Synthetic
tcggggcacggtattggtgattcacgagaacaaggggctcaacgactgggttcggtccgtcgcgggac

SEQ ID NO: 1564 - DNA, 68 bp, Artificial Sequence
  Synthetic
ttattctctaataagtttaactacagtctcacaatgtggcgtatttgggaacatatccatacacttaa

SEQ ID NO: 1565 - DNA, 68 bp, Artificial Sequence; identical to SEQ ID NO: 1564
  Synthetic

SEQ ID NO: 1566 - DNA, 68 bp, Artificial Sequence
  Synthetic
tttaaattttgtcctttcttcccgctatacccacttggcattgtaaaagataaatagttcgcccactc

SEQ ID NO: 1567 - DNA, 69 bp, Artificial Sequence; identical to SEQ ID NO: 1285
  Synthetic

SEQ ID NO: 1568 - DNA, 68 bp, Artificial Sequence; identical to SEQ ID NO: 1252
  Synthetic

SEQ ID NO: 1569 - DNA, 68 bp, Artificial Sequence
  Synthetic
aatgtttgtaaaggagactgataatggcatgtacaactatactcgtcggtaaaaaggcatcttatgat

SEQ ID NO: 1570 - DNA, 69 bp, Artificial Sequence; identical to SEQ ID NO: 1224
  Synthetic

SEQ ID NO: 1571 - DNA, 68 bp, Artificial Sequence; identical to SEQ ID NO: 1406
  Synthetic

SEQ ID NO: 1572 - DNA, 67 bp, Artificial Sequence
  Synthetic
cagtttttattttatgccttaattatacaccgcacttgcggtatgtcaatatggcaaaaagctattc

SEQ ID NO: 1573 - DNA, 66 bp, Artificial Sequence
  Synthetic
agttttatttttgtctgtataggctgtccgcatctgcggtatgcttatagggacaaaaattataaa

SEQ ID NO: 1574 - DNA, 66 bp, Artificial Sequence
  Synthetic
taacatatgtacggaagtatagacactcgattaatatttaatgtgtatacttccgtatttttattt

SEQ ID NO: 1575 - DNA, 66 bp, Artificial Sequence
  Synthetic
tcaacttttaaccctgttttaagacccagtattaaaatacttagcaataaaacaggggaattgata

SEQ ID NO: 1576 - DNA, 66 bp, Artificial Sequence
  Synthetic
ttgtatattgctaacaaaagtttagcctcatctccaccatttctatcaatatacataggaaatagt

SEQ ID NO: 1577 - DNA, 66 bp, Artificial Sequence
  Synthetic
tatcccctcctctcaaaacatgtagagactgtagtattgatgtcaagggttgataagtaagcgtgt

SEQ ID NO: 1578 - DNA, 67 bp, Artificial Sequence
  Synthetic
tttgcaattgctggtggttctggtgcttggccttgggcgattgcgaggtttaaggctttccactttt

SEQ ID NO: 1579 - DNA, 67 bp, Artificial Sequence
  Synthetic
tgtatcttgatgtacaacattgctctttattttcaaatacagattaatgttgtataaagtagccctg

SEQ ID NO: 1580 - DNA, 67 bp, Artificial Sequence
  Synthetic
ctatttattagatgtctaaacagtgcattactactctacaacctatattagacatcttataaaaagt

SEQ ID NO: 1581 - DNA, 66 bp, Artificial Sequence
  Synthetic
aatatagttgtataaaaagtcctttgccagatggcgaaggactttttgtacaacaaaaagtcacaa

SEQ ID NO: 1582 - DNA, 67 bp, Artificial Sequence
  Synthetic
cataatatgggtaagacctatcaccacatgtggagtgtgttgctctgctcgtaaaagcctagaaacc

SEQ ID NO: 1583 - DNA, 67 bp, Artificial Sequence
  Synthetic
tccattaactgtggtgcacatcataacataactgttcgtagtcatgcaagaatgtacaccgcagtaa

SEQ ID NO: 1584 - DNA, 67 bp, Artificial Sequence
  Synthetic
ggtgaaaatgttgtaataagcgtcacacactcaaatgtgttatgcttatacaaacaaaaattagaag

SEQ ID NO: 1585 - DNA, 66 bp, Artificial Sequence
  Synthetic
tacataatttcgtatattagatattaccagtttcaattggaaatacctaatatacgaaaaaaggcg

SEQ ID NO: 1586 - DNA, 66 bp, Artificial Sequence
  Synthetic
aattaaactaagatatttagatacgctactcgagacaagagtatctaaatatcctgtttttttcgc

SEQ ID NO: 1587 - DNA, 66 bp, Artificial Sequence
  Synthetic
gaagtatagggtttatttcattggggtgcccgaaggccctctgaagtaaactcttatgacgccccg

SEQ ID NO: 1588 - DNA, 66 bp, Artificial Sequence
  Synthetic
aaaaatttagttggttattggttactgtaacaaatcttacggtaaccaataaccaactttaaaact

SEQ ID NO: 1589 - DNA, 66 bp, Artificial Sequence
  Synthetic
atggataaaaaaatacagcgtttttcatgtacaactatactagttgtagtgcctaaataatgcttt

SEQ ID NO: 1590 - DNA, 67 bp, Artificial Sequence
  Synthetic
cgcaggttcgaatcctgcagggcgcgccatttcttcaattcctgcacgacgacaagctgatagccat

SEQ ID NO: 1591 - DNA, 67 bp, Artificial Sequence
  Synthetic
atttataattttagtttctcgtttcttcttcttccaacgagagaaaacgaggaactaaacaatctaa

SEQ ID NO: 1592 - DNA, 66 bp, Artificial Sequence
  Synthetic
aataatatttttatccttattgacatatgaggaatgccatgtataattaggggataaaaataaaaa

SEQ ID NO: 1593 - DNA, 67 bp, Artificial Sequence
  Synthetic
gaataactttttgccgtattgacataccgcaagtgcggtgtataattaaggcataaaataaaaaacg

SEQ ID NO: 1594 - DNA, 66 bp, Artificial Sequence
  Synthetic
tattggttaggtgtcctagatcaacctacagtccgctgtaaatcggtctatgacatctaactaata

SEQ ID NO: 1595 - DNA, 67 bp, Artificial Sequence
  Synthetic
cttcttatttaaactaagatatttagatacattgcttgagataagagtatctaaaattcacactttt

SEQ ID NO: 1596 - DNA, 67 bp, Artificial Sequence
  Synthetic
tttttacaaagaggtatttagatacatgagctacaatgcctgtatctaaatacctctaaagaaagac

SEQ ID NO: 1597 - DNA, 66 bp, Artificial Sequence
  Synthetic
acataaatatatggaagtatacacactatacattggttaattgtgcatacttccataaaatattaa

SEQ ID NO: 1598 - DNA, 67 bp, Artificial Sequence
  Synthetic
tttagatttttcgtatttacgataactttacatgtgtaaacataacataaatactaataaaatgtta

SEQ ID NO: 1599 - DNA, 66 bp, Artificial Sequence
  Synthetic
ttttcacttcgtgtacatggtggagtattaaactggtttaactctctaccatgtacactttttttc

SEQ ID NO: 1600 - DNA, 66 bp, Artificial Sequence
  Synthetic
tctgaatatcaataattttagtaaccttgattgaaatcaaggatagtaaatttctttatattttcc

SEQ ID NO: 1601 - DNA, 66 bp, Artificial Sequence
  Synthetic
agatgctctcccagctgagctaaactccctagagttcgataccatttgaaaacacaggagaacgag

SEQ ID NO: 1602 - DNA, 66 bp, Artificial Sequence
  Synthetic
tgtgctcttttattgtagttatatagtgtttggtcaattaaacacaacctaactacattaaataaa

SEQ ID NO: 1603 - DNA, 67 bp, Artificial Sequence
  Synthetic
aatcccctgccgcttcaagtagatgtctgcaggggacaccatttatcagttcgctcccatccgtacc

SEQ ID NO: 1604 - DNA, 67 bp, Artificial Sequence
  Synthetic
taatgatttttaatgtttcacgttcagcttttttatactaagttggcattataaaaaagcattgctt

SEQ ID NO: 1605 - DNA, 66 bp, Artificial Sequence
  Synthetic
gatttatgctttgtcgtcaccttgttggtgtaatgaggttgttaccaacagggtgataacaaagct

SEQ ID NO: 1606 - DNA, 66 bp, Artificial Sequence
  Synthetic
cgtttatgcattgttgtcaccttgttggtgtaatgaggttgacgacaacatggtagcgacaatata

SEQ ID NO: 1607 - DNA, 66 bp, Artificial Sequence
  Synthetic
tttttttacgtgaatgttttgtaacaactacagtctaccgcgtaacacaccattcatcaaaattta

SEQ ID NO: 1608 - DNA, 67 bp, Artificial Sequence
  Synthetic
ggtttataatttttgtccctataagcataccgcagatgccgacagactatatagacaaaaataaaac

SEQ ID NO: 1609 - DNA, 67 bp, Artificial Sequence
  Synthetic
agttttatttttgtctatattggctgtcggcatctgcggtatgcttatagggacaaaaattataaac

SEQ ID NO: 1610 - DNA, 67 bp, Artificial Sequence
  Synthetic
gtggaaaatataaagaattttactatcctacatttcaattaaagatactaaatctcttgatttttga

SEQ ID NO: 1611 - DNA, 66 bp, Artificial Sequence
  Synthetic
cctattgaatgagagttttagatacgcttttagaatgtttggtatctaaaactcacgcttttttga

SEQ ID NO: 1612 - DNA, 66 bp, Artificial Sequence
  Synthetic
aaaccatcaacaattttcctctgagtgtcatttacttcccgtttttcccgatttggctacatgaca

SEQ ID NO: 1613 - DNA, 66 bp, Artificial Sequence
  Synthetic
tcttttgtcatcaccctgttggcgtcaacctaattacaccaacaaggtgacgacaaagcataaacg

SEQ ID NO: 1614 - DNA, 66 bp, Artificial Sequence
  Synthetic
ttttcttttgtatcaaaatcagtaggaacatagaaataatcttactgagtttaatacaatgccgtg

SEQ ID NO: 1615 - DNA, 67 bp, Artificial Sequence
  Synthetic
cagggttactttatacaacattaatctgtatttgaaaataaagagcaatgttgtacatcaagatgca

SEQ ID NO: 1616 - DNA, 67 bp, Artificial Sequence
  Synthetic
tgtatcttgatgtacaacattgctctttattttcaaatacagaataatgttgcatataatattacta

SEQ ID NO: 1617 - DNA, 67 bp, Artificial Sequence
  Synthetic
tgtatcttgatgtacaacattgctctttattttcaaatacagaataatgttgcatataatatcacta

SEQ ID NO: 1618 - DNA, 67 bp, Artificial Sequence
  Synthetic
tgtatcttgatgtacaacattgctctttattttcaaatacagattaatgttgtataaagtaaccctg

SEQ ID NO: 1619 - DNA, 67 bp, Artificial Sequence
  Synthetic
tgtatcttgatgtacaacattactctttattttcaaatacagaataatgttgcatataatattacta

SEQ ID NO: 1620 - DNA, 66 bp, Artificial Sequence
  Synthetic
tgatataagtacggaagtatagacactcgattaatatttaatgtgtatacttccgtattattgttt

SEQ ID NO: 1621 - DNA, 66 bp, Artificial Sequence
  Synthetic
ctataaaaatacggaagtatacacattaaatattaatcaagtgtctatacttccgtacataagtta

SEQ ID NO: 1622 - DNA, 66 bp, Artificial Sequence
  Synthetic
taacatatgtacggaagtatagacacttgattaatatttaatgtgtatacttccgtatttttgttt

SEQ ID NO: 1623 - DNA, 67 bp, Artificial Sequence
  Synthetic
aaatacatattctcttgttgtcatcatgttggtgtaaacctaattacaccaagaggatgacgacaaa

SEQ ID NO: 1624 - DNA, 67 bp, Artificial Sequence
  Synthetic
ataatataaaatactgttgttctatatggattggagttgcaacacaactacaaatgcagtataaagg

SEQ ID NO: 1625 - DNA, 67 bp, Artificial Sequence
  Synthetic
agcagggcgatcctgagtttaatctggctcgcctccaccagcaaaggtcacaatcgtgtcgatgtca

SEQ ID NO: 1626 - DNA, 67 bp, Artificial Sequence
  Synthetic
ttagattgtttagttcctcgtttcctctcgttggaagaagaataaacgagataccaaaaaagaacat

SEQ ID NO: 1627 - DNA, 67 bp, Artificial Sequence
  Synthetic
atagtaggaagatacagagtgtactctcaacgcacatcgagtgtgtaggactgcttacacgtgtgga

SEQ ID NO: 1628 - DNA, 67 bp, Artificial Sequence
  Synthetic
tccacacgtgtaagcagtcctacacactcgatgtgcgttgagagtacactctgtatcttcctactat

SEQ ID NO: 1629 - DNA, 67 bp, Artificial Sequence
  Synthetic
ttagattatttagtacctcgttatctctcgctggaagaagaagaaacgagaaactaaaattataaat

SEQ ID NO: 1630 - DNA, 66 bp, Artificial Sequence
  Synthetic
tattttggtagtttatagaagtaatttcagttgatgttcactccattaattaccaaaatttaaaaa

SEQ ID NO: 1631 - DNA, 67 bp, Artificial Sequence
  Synthetic
aaatttgttagggtaaaaaagtcatagttgggtgcgccatcgattaaccctaactgataaataaaaa

SEQ ID NO: 1632 - DNA, 66 bp, Artificial Sequence
  Synthetic
ttattttggtagtttatagaagtaatttcagttgatattcactccattaattaccaaaaaaacagg

SEQ ID NO: 1633 - DNA, 66 bp, Artificial Sequence
  Synthetic
tatggaattgtatcaatctcggcgtggttttgtccgttgccactctgaaattgatacaatgtaaca

SEQ ID NO: 1634 - DNA, 66 bp, Artificial Sequence; identical to SEQ ID NO: 1633
  Synthetic

SEQ ID NO: 1635 - DNA, 67 bp, Artificial Sequence
  Synthetic
tgtctctttttattagggtttatatcaactacacacatgtaaagtagacataaacagcaaaaatttg

SEQ ID NO: 1636 - DNA, 66 bp, Artificial Sequence
  Synthetic
taaagatcgtaaaaaagaaatagagttccgaattacaccatttataaaaaagctgctggaggcaag

SEQ ID NO: 1637 - DNA, 67 bp, Artificial Sequence
  Synthetic
tagtaatattatatgcaacattattctgtatttgaaaataaagagcaatgttgtacatcaagataca

SEQ ID NO: 1638 - DNA, 67 bp, Artificial Sequence
  Synthetic
tgtgtcttgatgtacaacattactctttattttcaaatacagaataatgttgcatataatattacta

SEQ ID NO: 1639 - DNA, 67 bp, Artificial Sequence
  Synthetic
ttcattattttaatagagatagaaatcaaccatgcacatggtagcatgagtgttctatgaaaaaaga

SEQ ID NO: 1640 - DNA, 67 bp, Artificial Sequence; identical to SEQ ID NO: 1619
  Synthetic

SEQ ID NO: 1641 - DNA, 66 bp, Artificial Sequence
  Synthetic
tatttatataaaatagtgtttttgtaaagtacacatcaccatatttgacaaaaaacctataaataa

SEQ ID NO: 1642 - DNA, 67 bp, Artificial Sequence
  Synthetic
ttagattgtttagtatctcgttatctctcgttggagggagaagaaacgggataccaaaaataaagac

SEQ ID NO: 1643 - DNA, 67 bp, Artificial Sequence
  Synthetic
tggataaaaaaatacagcgtttttcatgtacaactatactcgttgtagtgcctaaataatgctttta

SEQ ID NO: 1644 - DNA, 66 bp, Artificial Sequence
  Synthetic
ttaataaactatggaagtatgtacagtcttgcaatgttgagtgaacaaacttccataataaaataa

SEQ ID NO: 1645 - DNA, 66 bp, Artificial Sequence
  Synthetic
ttaatttttgtacggaagtagatactatctttcaatatccatgttacttagtgccatacaaaaacc

SEQ ID NO: 1646 - DNA, 67 bp, Artificial Sequence
  Synthetic
gtctttttaccttatataacagtttcatgcacgtggagacggtagtattgatgtcacgaaaagaaaa

SEQ ID NO: 1647 - DNA, 66 bp, Artificial Sequence
  Synthetic
tgttataaacctgtgtgagagttaagtttacatgcctaaccttaacttttacgcaggttcagctta

SEQ ID NO: 1648 - DNA, 67 bp, Artificial Sequence
  Synthetic
ttgacttttgacatcaatactacgcactccacatggcttgagaggacagaatgaatgtcatttgagt

SEQ ID NO: 1649 - DNA, 67 bp, Artificial Sequence
  Synthetic
tccataatatgggtaagacctatcaccacacgtggagtgtgttgctctgcttgtaaaagcttagaaa

SEQ ID NO: 1650 - DNA, 67 bp, Artificial Sequence; identical to SEQ ID NO: 1627
  Synthetic

SEQ ID NO: 1651 - DNA, 67 bp, Artificial Sequence
  Synthetic
ccgaagcatcgtatcaatgcttcggtcaatgtttggcaaagggcacgagtttgatacaaaatgcacc

SEQ ID NO: 1652 - DNA, 67 bp, Artificial Sequence; identical to SEQ ID NO: 1651
  Synthetic

SEQ ID NO: 1653 - DNA, 67 bp, Artificial Sequence; identical to SEQ ID NO: 1651
  Synthetic

SEQ ID NO: 1654 - DNA, 67 bp, Artificial Sequence
  Synthetic
gtagccacttgttttacacgtcttgtctctggacgaggcatgtaaaacaggtgggcttgatcagcta

SEQ ID NO: 1655 - DNA, 67 bp, Artificial Sequence
  Synthetic
tatgataattttagtattcatgattggttgtttgaatagcccgttatgaatactaaaaattccactc

SEQ ID NO: 1656 - DNA, 66 bp, Artificial Sequence
  Synthetic
acccttaaacatataacatgtttaagggtattcattacccacttcatgttgtatgttatgtaaaaa

SEQ ID NO: 1657 - DNA, 66 bp, Artificial Sequence
  Synthetic
tgtgctcttttgttgtatttatatggcgtttggtcaattaaacacaacctaactacatcaaatgaa

SEQ ID NO: 1658 - DNA, 67 bp, Artificial Sequence
  Synthetic
gtcgtcaccttgttggtgtaattagattaaccccaacagggtgataacaaaagaaggattttttaat

SEQ ID NO: 1659 - DNA, 67 bp, Artificial Sequence
  Synthetic
cctgtattgtgctacttagagcataaggcgaccatgccttacaagctcaaaatagcacacgtttccg

SEQ ID NO: 1660 - DNA, 66 bp, Artificial Sequence
  Synthetic
caaataatgtagtacccaaattaagtttcacacaagcaaccttaatcgggtactacttaatatcta

SEQ ID NO: 1661 - DNA, 66 bp, Artificial Sequence
  Synthetic
tctgagaattagtatattttcctattcgcaggggcaccctaacgaaacccatcctatactaggggc

SEQ ID NO: 1662 - DNA, 66 bp, Artificial Sequence
  Synthetic
ataccaataacatataaagagtagtgtgtaatgaaataaacactactatttatatgttattttcta

SEQ ID NO: 1663 - DNA, 67 bp, Artificial Sequence
  Synthetic
tccattaactgtggtgtacatcataacataactgttcgtagtcatgcaagaatgtacaccgcagtaa

SEQ ID NO: 1664 - DNA, 66 bp, Artificial Sequence
  Synthetic
aaagcattatttaggcactacaactagtatagttgtacatgaaaaacgctgtatttttttatccat

SEQ ID NO: 1665 - DNA, 66 bp, Artificial Sequence
  Synthetic
gcccctagtataggatgggtttcgttagggtgcccctacgaatagaaaaatatactaattctcagg

SEQ ID NO: 1666 - DNA, 66 bp, Artificial Sequence
  Synthetic
cccccagtgtaggatttatatcactaggttgccccaacgaatagaaaagtaaactagctttcagcg

SEQ ID NO: 1667 - DNA, 67 bp, Artificial Sequence
  Synthetic
tagattgtttagtatctcattatctctcgttggacggagacgaatcgagaaactaaaattataaata

SEQ ID NO: 1668 - DNA, 66 bp, Artificial Sequence
  Synthetic
tcgttccataatatgggtaagacctatcaccacacatcgagtgtgtggttctgctcgtaaaagcct

SEQ ID NO: 1669 - DNA, 67 bp, Artificial Sequence
  Synthetic
ccccctcgtgttattgtgggtacatgatatttggcaacccgaatgtagtcaacccaaaataactaaa

SEQ ID NO: 1670 - DNA, 67 bp, Artificial Sequence
  Synthetic
atatgacatcaatgccatcaactcgagccacgtggagtgtgtggttctgctcgtaaaagcctagaaa

SEQ ID NO: 1671 - DNA, 67 bp, Artificial Sequence; identical to SEQ ID NO: 1579
  Synthetic

SEQ ID NO: 1672 - DNA, 66 bp, Artificial Sequence; identical to SEQ ID NO: 1581
  Synthetic

SEQ ID NO: 1673 - DNA, 67 bp, Artificial Sequence
  Synthetic
cgaaagacatcaatactgtcctctcgagccatgttgagtgcgtcacattgatgtcaagggtttagaa

SEQ ID NO: 1674 - DNA, 66 bp, Artificial Sequence
  Synthetic
aaagaaaaaattctttatttctacatacggttgtccgtatgtagaaaatagtaggaatatatgaga

SEQ ID NO: 1675 - DNA, 67 bp, Artificial Sequence
  Synthetic
ctttattttttttgtatcccatttcctctccctccaacgagaggaaatgaggcactaaaccagttga

SEQ ID NO: 1676 - DNA, 67 bp, Artificial Sequence
  Synthetic
tgttctttttttggtatctcgtttcttcttcttccaacgagagaaaacgaggtactaaataagctaa

SEQ ID NO: 1677 - DNA, 67 bp, Artificial Sequence; identical to SEQ ID NO: 1676
  Synthetic

SEQ ID NO: 1678 - DNA, 66 bp, Artificial Sequence
  Synthetic
cttaaagattgagtttacttttgcagtcattggggcaccctaacgaaacccatcctatactagggg

SEQ ID NO: 1679 - DNA, 66 bp, Artificial Sequence
  Synthetic
taaattttgatgaatggtgtgttacgcggtagactgtagttgttacaaaacattcacgtaaaaaaa

SEQ ID NO: 1680 - DNA, 66 bp, Artificial Sequence
  Synthetic
aatattaatgagtgttatgtaactagaaagaccgcaatagttacaaaacattcattaaaaataacc

SEQ ID NO: 1681 - DNA, 66 bp, Artificial Sequence; identical to SEQ ID NO: 1614
  Synthetic

SEQ ID NO: 1682 - DNA, 66 bp, Artificial Sequence
  Synthetic
cccctagtataggatgggtttcgttagggtgccccaatgattgcaaaagtaaactcaatctttaag

SEQ ID NO: 1683 - DNA, 67 bp, Artificial Sequence
  Synthetic
ctctttttattagggtttatatcaactatacacatgtaaagtagacataaacagcaaaaatttgata

SEQ ID NO: 1684 - DNA, 67 bp, Artificial Sequence
  Synthetic
aagatattaccctgaatgaagtcttacgtcgtcaatctctgctaagattaccaaataaccccgacaa

SEQ ID NO: 1685 - DNA, 67 bp, Artificial Sequence; identical to SEQ ID NO: 1684
  Synthetic

SEQ ID NO: 1686 - DNA, 67 bp, Artificial Sequence
  Synthetic
tggcctctcctgaagtgtcagttgagcgccttcggctttccgagtgcgcgtgaactacagttctagc

SEQ ID NO: 1687 - DNA, 67 bp, Artificial Sequence; identical to SEQ ID NO: 1659
  Synthetic

SEQ ID NO: 1688 - DNA, 67 bp, Artificial Sequence
  Synthetic
tacgttgtttagtacctcaatttctctctctggacggagacgaatcgagaaactaaaattataaata

SEQ ID NO: 1689 - DNA, 67 bp, Artificial Sequence
  Synthetic
aaacccatttttaccttatgtaaaaaaatcacgtgatatgtttaccaaatgacaaaaatgatataat

SEQ ID NO: 1690 - DNA, 66 bp, Artificial Sequence
  Synthetic
ggttttttatttgtatgccataattatacaccgcacttgcggtatgtcaataagacatacgaattt

SEQ ID NO: 1691 - DNA, 66 bp, Artificial Sequence
  Synthetic
cttaaagattgagtttacttttgcagtcattggggcaccctaacgaaacccatcctatactaggga

SEQ ID NO: 1692 - DNA, 67 bp, Artificial Sequence
  Synthetic
aacgtgcctttgtcgcagctgccaaagtttagccgctcaacttggtggcgaccgatgcctgcggtca

SEQ ID NO: 1693 - DNA, 67 bp, Artificial Sequence
  Synthetic
cctttaatttttgggttaaaggaacattgactctagtgagtgttatattaacccaaaaagagcctac

SEQ ID NO: 1694 - DNA, 66 bp, Artificial Sequence; identical to SEQ ID NO: 1575
  Synthetic

SEQ ID NO: 1695 - DNA, 67 bp, Artificial Sequence
  Synthetic
tccgtgataggccgcgtggcgtcgcctcagcaccaccacttacccaaaacccaacccttatcggttg

SEQ ID NO: 1696 - DNA, 66 bp, Artificial Sequence
  Synthetic
actcaaatgacattcattctgtcctctcaagccacgttgagtgcgtagtattgatgtcaagggttg

SEQ ID NO: 1697 - DNA, 67 bp, Artificial Sequence
  Synthetic
tcaactggtttagtgcctcatttcctctcgttggaagaagaagaaacgagataccaaaaaaagaaca

SEQ ID NO: 1698 - DNA, 66 bp, Artificial Sequence
  Synthetic
agacattcatttttattagggtttatgtaaagtataagcatgtaaacttaacataaatacaaataa

SEQ ID NO: 1699 - DNA, 66 bp, Artificial Sequence
  Synthetic
aacattttacaagtatataacatgtaataggcaatgaattaccctggacaagttgtcagtctaggg

SEQ ID NO: 1700 - DNA, 66 bp, Artificial Sequence
  Synthetic
ttatttataggttttttgtcaaatacggtgatgtgtactttacaaaaacactattttatataaata

SEQ ID NO: 1701 - DNA, 66 bp, Artificial Sequence
  Synthetic
agaataattatatgtcttctattggcggtaataccccagcatagacaatatacatataatctttct

SEQ ID NO: 1702 - DNA, 67 bp, Artificial Sequence; identical to SEQ ID NO: 1616
  Synthetic

SEQ ID NO: 1703 - DNA, 66 bp, Artificial Sequence
  Synthetic
ggttatttttacggaagtatacacattaaatattaatcaggtgtctatacttccgtacatatgtta

SEQ ID NO: 1704 - DNA, 66 bp, Artificial Sequence
  Synthetic
ggtttttatatgtgcgttatgtaacaagcaccacggctatagttacataacccacattaaaatata

SEQ ID NO: 1705 - DNA, 66 bp, Artificial Sequence
  Synthetic
ttatttttttacggaagtatacacaataaatattaatagagtgtctatacttccgtacatatgtta

SEQ ID NO: 1706 - DNA, 66 bp, Artificial Sequence
  Synthetic
ttgatattttatggaagtatgcacaattaaccaatgtatagtgtgtgtacttccatatatttatgc

SEQ ID NO: 1707 - DNA, 66 bp, Artificial Sequence
  Synthetic
aattggaaaatataaataattttagtaacctacatctcaataaaggatagtaaaattattgatttt

SEQ ID NO: 1708 - DNA, 67 bp, Artificial Sequence; identical to SEQ ID NO: 1688
  Synthetic

SEQ ID NO: 1709 - DNA, 66 bp, Artificial Sequence
  Synthetic
ctcttttttatgtatggtttgtaacaatatccacctacaaagtgctaaaccatacatgttaaaaat

SEQ ID NO: 1710 - DNA, 66 bp, Artificial Sequence
  Synthetic
tctttttttatgtatggtttgtaacaatatccacctacaaagtgctaaaccatacatgttaaaaat

SEQ ID NO: 1711 - DNA, 66 bp, Artificial Sequence
  Synthetic
ttagggttaccattgatcatgaagaccattatatcatccagctcatagtattttgtctctttcttt

SEQ ID NO: 1712 - DNA, 66 bp, Artificial Sequence
  Synthetic
ttcaagtctaggatacgaacagtacgtttgcgcacacgataacgtgccgttcgtaaaccgacgagc

SEQ ID NO: 1713 - DNA, 67 bp, Artificial Sequence
  Synthetic
agatgtgatgttaattattctggtcagtacctcctgaccggattaattaatatcactaggaaatggc

SEQ ID NO: 1714 - DNA, 66 bp, Artificial Sequence
  Synthetic
ttaatatcagttgtatttatactactagctctgtagctaacgttatataaatacacttaaaataaa

SEQ ID NO: 1715 - DNA, 66 bp, Artificial Sequence
  Synthetic
aaacccttgatataccaatagtttcaaatccgtctaccgcctttattataggattttgtccgaatt

SEQ ID NO: 1716 - DNA, 66 bp, Artificial Sequence
  Synthetic
ttaatttagtatggaagtatgcacaattgagcaatgtataatgtgtgtacttccatatatttatac

SEQ ID NO: 1717 - DNA, 66 bp, Artificial Sequence
  Synthetic
gtataaatatatggaagtacacacattatacattgctcaattgtgtatacttccatactaaattaa

SEQ ID NO: 1718 - DNA, 67 bp, Artificial Sequence
  Synthetic
tcacgtgttttaatggagttttaactggtctggatgtgcagcacaggtaaaactacactaattatta

SEQ ID NO: 1719 - DNA, 66 bp, Artificial Sequence
  Synthetic
tagaagtatagggtttgtttcattggggtgcccgaaggatggttgagatatacttttggcgagcag

SEQ ID NO: 1720 - DNA, 67 bp, Artificial Sequence
  Synthetic
ctttaatttttgggttaaaggaacattgactctactaagtgttatattaacccaaaaaagagccttc

SEQ ID NO: 1721 - DNA, 67 bp, Artificial Sequence
  Synthetic
tcctgaatggttactacgattggtttggttggtgttattgctgtgaataaagttgttggtgtaacca

SEQ ID NO: 1722 - DNA, 66 bp, Artificial Sequence
  Synthetic
cccctagtataggatgggtttcgttagggtgccccaacgaatagaaaagtaaactagctttcagcg

SEQ ID NO: 1723 - DNA, 66 bp, Artificial Sequence; identical to SEQ ID NO: 1678
  Synthetic

SEQ ID NO: 1724 - DNA, 66 bp, Artificial Sequence
  Synthetic
cccctagtataggatgggtttcgttagggtgccccaacgaatagaaaagtaaaccagttttcagcg

SEQ ID NO: 1725 - DNA, 66 bp, Artificial Sequence; identical to SEQ ID NO: 1696
  Synthetic

SEQ ID NO: 1726 - DNA, 66 bp, Artificial Sequence
  Synthetic
tttttatataatatagtgtttttgttaagtacacatcactatatttgacaaaaagtctataaataa

SEQ ID NO: 1727 - DNA, 67 bp, Artificial Sequence
  Synthetic
gccctgttaatatgtatattggctaacgctcggcaacccgaacgttagccaatatacaaaccatgct

SEQ ID NO: 1728 - DNA, 67 bp, Artificial Sequence
  Synthetic
gccctgttaatatgtatatcggctaacgctcggcaacccgaacgttagccaatatacaaaccatgct

SEQ ID NO: 1729 - DNA, 67 bp, Artificial Sequence
  Synthetic
aaatttatagtgagggtttgtcatagacaagacctccaataagatacaagaacacaacggcttaaaa

SEQ ID NO: 1730 - DNA, 66 bp, Artificial Sequence
  Synthetic
ttattttggtagtttatagaagtaatttcagttgatattcactccattaactaccaaaataaaaaa

SEQ ID NO: 1731 - DNA, 67 bp, Artificial Sequence; identical to SEQ ID NO: 1628
  Synthetic

SEQ ID NO: 1732 - DNA, 66 bp, Artificial Sequence
  Synthetic
ttaccctagacatcaatgctaccaactcaacatgggacgagttgatagaattgatgtatttgcgat

SEQ ID NO: 1733 - DNA, 66 bp, Artificial Sequence
  Synthetic
gaaatgacgtacttttcatttcctcgtgccatgtggagacggtggtattgatgtcaagggcggaga

SEQ ID NO: 1734 - DNA, 67 bp, Artificial Sequence; identical to SEQ ID NO: 1663
  Synthetic

SEQ ID NO: 1735 - DNA, 67 bp, Artificial Sequence
  Synthetic
tactttaattttaggttaatggtccatttcctctagtaaatgttatattaacccaaaaaaaagagtc

SEQ ID NO: 1736 - DNA, 67 bp, Artificial Sequence
  Synthetic
cacattatttagttcctcgttttctctcgctggacggagaataaatgagaaactaaaatacaaataa

SEQ ID NO: 1737 - DNA, 66 bp, Artificial Sequence
  Synthetic
attaattttgtacggaagtagatactatctttcaatatccatgttacttagtgccatacaaaaacc

SEQ ID NO: 1738 - DNA, 67 bp, Artificial Sequence
  Synthetic
tcgcggcccacttgctttacacgtctcgtccaggaacgagacgtataaaacaagtggctacggccag

SEQ ID NO: 1739 - DNA, 66 bp, Artificial Sequence
  Synthetic
taacgtatgtacggaagtatagacacctgattaatatttaatgtgtatacttccgtattttttata

SEQ ID NO: 1740 - DNA, 66 bp, Artificial Sequence
  Synthetic
gtttttttgtttgcgttaaatggaattatccagtaggacatttcctaaaagtggctaattttttgt

SEQ ID NO: 1741 - DNA, 67 bp, Artificial Sequence
  Synthetic
tcttggcgagtgagcagacctatacactcgatgtgcgttgactgtctacttagtatcttcctactat

SEQ ID NO: 1742 - DNA, 66 bp, Artificial Sequence
  Synthetic
gcataaatatatggaagtacacacactatacattggttaattgtgcatacttccataaaatattaa

SEQ ID NO: 1743 - DNA, 67 bp, Artificial Sequence
  Synthetic
gaagccgtatagtataggaatggtgtcgcttgggtgcccgagtgatgcttaaaatacactcggtgct

SEQ ID NO: 1744 - DNA, 66 bp, Artificial Sequence
  Synthetic
ttcattagctttgttatcaccctgttggtaacaatctaattacaccaacaaggtgacaacaaagca

SEQ ID NO: 1745 - DNA, 66 bp, Artificial Sequence
  Synthetic
tttctgcattgtcctattataattatgagccatttggtcattataatagacctatacacataaaca

SEQ ID NO: 1746 - DNA, 66 bp, Artificial Sequence
  Synthetic
tattcttagtggggcttaagtcaacttgtcattggtgtcatgttttcttaagcctcaaaataaaaa

SEQ ID NO: 1747 - DNA, 66 bp, Artificial Sequence
  Synthetic
ctattaattgggggtatgtcttacttattagcgtacctatttcgcacccccaataaacaccccacc

SEQ ID NO: 1748 - DNA, 66 bp, Artificial Sequence
  Synthetic
catctaccgcaaagtataggtatttaatccttcgggcaccccaatgaaacaaaccctatacttcta

SEQ ID NO: 1749 - DNA, 66 bp, Artificial Sequence
  Synthetic
tcaaaaaagcgtgagttttagataccaaacattctaaaagcgtatctaaaactctcattcaatagg

SEQ ID NO: 1750 - DNA, 66 bp, Artificial Sequence
  Synthetic
aaagcattatttaggtactacaactagtatagttgtacatgaaaaacgctgtatttttttatccat

SEQ ID NO: 1751 - DNA, 66 bp, Artificial Sequence
  Synthetic
aaatcctcccttttacatctgtacgggcttggaagcaggcacgtacggttgtaaaaggaaatccta

SEQ ID NO: 1752 - DNA, 67 bp, Artificial Sequence
  Synthetic
tctttatttttttgtatcccatttcctctccctccaacgagagaaaacgagaaactaaacaatctaa

SEQ ID NO: 1753 - DNA, 66 bp, Artificial Sequence
  Synthetic
ttatttatagactttttgtcaaatatagtgatgtgtactttacaaaaacactattttatataaata

SEQ ID NO: 1754 - DNA, 66 bp, Artificial Sequence
  Synthetic
tttaatttattcgtatttacgttaccttcactactactaacttcacataaacccaaactttttaca

SEQ ID NO: 1755 - DNA, 67 bp, Artificial Sequence
  Synthetic
ctccttttattagggtttgtgtcatctacacacatgtaaagtttacataaaccctaaaaagatcgac

SEQ ID NO: 1756 - DNA, 67 bp, Artificial Sequence
  Synthetic
agtgtggttgtttttgttggaagtgtgtatcaggtaacagcatagttattccgaacttccaattaat

SEQ ID NO: 1757 - DNA, 67 bp, Artificial Sequence
  Synthetic
atgttctttttttgtatctcgtttcttcttcttccaacgagagaaaacgaggaactaaacaatctaa

SEQ ID NO: 1758 - DNA, 66 bp, Artificial Sequence
  Synthetic
tgagacaaacagccatggctggttcccggatacatacaattatttgttattgtgcatcattctggt

SEQ ID NO: 1759 - DNA, 66 bp, Artificial Sequence
  Synthetic
tatcccctcctctcaaaacatgtagagaccgtagtattgatgtcaagggtagataagtaagagtgt

SEQ ID NO: 1760 - DNA, 66 bp, Artificial Sequence; identical to SEQ ID NO: 1759
  Synthetic

SEQ ID NO: 1761 - DNA, 67 bp, Artificial Sequence
  Synthetic
ttagcttatttagtacctcgttttctctcgttggaagaagaataaacgagataccaaaaaagaacat

SEQ ID NO: 1762 - DNA, 66 bp, Artificial Sequence
  Synthetic
taaattttaatagcagttgtgtcactatttaggtctatcgtgtgacaaaactaacatacaaaaacc

SEQ ID NO: 1763 - DNA, 66 bp, Artificial Sequence
  Synthetic
agttttatacataaaaatagtgtaacaagcactacctaccctgtaacactactaccattaaaattt

SEQ ID NO: 1764 - DNA, 66 bp, Artificial Sequence
  Synthetic
aaaaaaaggcgctctttgatgtagcgcccatatgctcactacatgaaaaagcgataattttaagta

SEQ ID NO: 1765 - DNA, 67 bp, Artificial Sequence
  Synthetic
tagattgtttagttcctcgtttcctctcgttggacggagaataaatgagatactaatccataataat

SEQ ID NO: 1766 - DNA, 67 bp, Artificial Sequence
  Synthetic
ttagattgtttagttcctcgttttctctcgttggaagaagaagaaacgagataccaaaaaagaacat

SEQ ID NO: 1767 - DNA, 66 bp, Artificial Sequence; identical to SEQ ID NO: 1703
  Synthetic

SEQ ID NO: 1768 - DNA, 66 bp, Artificial Sequence
  Synthetic
atgacttcgatagttaattatgaaacactcttggatataggtgcatcaaaattaactaaaggaaaa

SEQ ID NO: 1769 - DNA, 66 bp, Artificial Sequence
  Synthetic
tgcgttaggtgtatatcatgcctagcgcaattcattacatcatacatgttgtacacctactttaaa

SEQ ID NO: 1770 - DNA, 67 bp, Artificial Sequence
  Synthetic
ttagcttgtttagtacctcgatttctctcgttggagggagaagaaacgggataccaaaaataaagac

SEQ ID NO: 1771 - DNA, 67 bp, Artificial Sequence; identical to SEQ ID NO: 1697
  Synthetic

SEQ ID NO: 1772 - DNA, 66 bp, Artificial Sequence
  Synthetic
agaattttattagtatttatgtcaggtttaagcatgtaaacataacataaacacaaaaaatcttat

SEQ ID NO: 1773 - DNA, 67 bp, Artificial Sequence
  Synthetic
tatgtgggtttggttttctgttaaactacaccaccaaaattcagcgcccaactgttctcagttgggc

SEQ ID NO: 1774 - DNA, 67 bp, Artificial Sequence; identical to SEQ ID NO: 1773
  Synthetic

SEQ ID NO: 1775 - DNA, 67 bp, Artificial Sequence; identical to SEQ ID NO: 1642
  Synthetic

SEQ ID NO: 1776 - DNA, 66 bp, Artificial Sequence
  Synthetic
cgctgaaagctagtttacttttctattcgttggggcaccctaacgaaacccatcctatactagggg

SEQ ID NO: 1777 - DNA, 67 bp, Artificial Sequence
  Synthetic
attctttaaaaagagttctcgtattttattggaggtcttgtctatgacataccctcactataaattt

SEQ ID NO: 1778 - DNA, 67 bp, Artificial Sequence
  Synthetic
ttctctaatcttctttatttctacatacggtcaaccgtatgtagaaataaagaagtattgagtagta

SEQ ID NO: 1779 - DNA, 66 bp, Artificial Sequence
  Synthetic
tagaaaataacatataaaaagtagtgtttatttcattacacactactctttatatgttattggtat

SEQ ID NO: 1780 - DNA, 66 bp, Artificial Sequence
  Synthetic
aggccagagcagcgtctggcctttaaataatggtggtggaatggcgacgaaataaaaacccaaaat

SEQ ID NO: 1781 - DNA, 67 bp, Artificial Sequence; identical to SEQ ID NO: 1618
  Synthetic

SEQ ID NO: 1782 - DNA, 67 bp, Artificial Sequence
  Synthetic
atagtaggaagatactaagtagacagtcaacgcacatcgagtgtgtaggactgcttacacgtgtgga

SEQ ID NO: 1783 - DNA, 66 bp, Artificial Sequence
  Synthetic
acataaatatatggaagtacacacactatacattggttgattgtgcatacttccataaaatattaa

SEQ ID NO: 1784 - DNA, 66 bp, Artificial Sequence
  Synthetic
tatattgtcatcaccctgttggcgtcaacctaattacaccaacaaggtgacgacaaagcataaacg

SEQ ID NO: 1785 - DNA, 66 bp, Artificial Sequence
  Synthetic
tacatattttcattataatttaaagacggtaggagtacgaggtgtctttaaatagttatgaaatta

SEQ ID NO: 1786 - DNA, 67 bp, Artificial Sequence
  Synthetic
ggtcaggcggcacctaggggggtggttaacgctcccatgagcgttgcgcacaccctaatgttgcctc

SEQ ID NO: 1787 - DNA, 67 bp, Artificial Sequence; identical to SEQ ID NO: 1649
  Synthetic

SEQ ID NO: 1788 - DNA, 67 bp, Artificial Sequence; identical to SEQ ID NO: 1670
  Synthetic

SEQ ID NO: 1789 - DNA, 67 bp, Artificial Sequence
  Synthetic
ttagattgtttagttcctcgttttctctcgttggagggagaagaaacgggataccaaaaataaagac

SEQ ID NO: 1790 - DNA, 66 bp, Artificial Sequence; identical to SEQ ID NO: 1668
  Synthetic

SEQ ID NO: 1791 - DNA, 67 bp, Artificial Sequence; identical to SEQ ID NO: 1580
  Synthetic

SEQ ID NO: 1792 - DNA, 67 bp, Artificial Sequence
  Synthetic
tatttataattttagtttctcgattcgtctccgtccagcgagagataacgaggtactaaataatcta

SEQ ID NO: 1793 - DNA, 67 bp, Artificial Sequence; identical to SEQ ID NO: 1572
  Synthetic

SEQ ID NO: 1794 - DNA, 66 bp, Artificial Sequence; identical to SEQ ID NO: 1780
  Synthetic

SEQ ID NO: 1795 - DNA, 67 bp, Artificial Sequence
  Synthetic
aaacaaaaataaggggttattacccctatttatttcaataaatatgggtaataacccttaaatgatt

SEQ ID NO: 1796 - DNA, 67 bp, Artificial Sequence; identical to SEQ ID NO: 1635
  Synthetic

SEQ ID NO: 1797 - DNA, 66 bp, Artificial Sequence; identical to SEQ ID NO: 1588
  Synthetic

SEQ ID NO: 1798 - DNA, 66 bp, Artificial Sequence
  Synthetic
tttttatttttatcccctaattatacatgggattcctcatatgtcaataaggataaaaatattatt

SEQ ID NO: 1799 - DNA, 66 bp, Artificial Sequence
  Synthetic
gtttttttgtttgcgttaaatggaattatccagtaggacagttcctaaaagtggctaattttttgt

SEQ ID NO: 1800 - DNA, 66 bp, Artificial Sequence
  Synthetic
aaagtttagatggggtttgtgggtagagcctcccgaataacacaccaaaacccccacatatgccac

SEQ ID NO: 1801 - DNA, 66 bp, Artificial Sequence; identical to SEQ ID NO: 1573
  Synthetic

SEQ ID NO: 1802 - DNA, 67 bp, Artificial Sequence
  Synthetic
gctaacagatcggcatatgagtgctatctactgctggcagtgaactgtactcagacgcaaataagca

SEQ ID NO: 1803 - DNA, 66 bp, Artificial Sequence
  Synthetic
aattggaaaatataaataattttagtaacctacatttcaatcaaggatagtaaaactctcactctt

SEQ ID NO: 1804 - DNA, 67 bp, Artificial Sequence
  Synthetic
ttttatcaaaaattttactatccttgattgagatgtaggttactaaaattatttatattttccactt

SEQ ID NO: 1805 - DNA, 66 bp, Artificial Sequence
  Synthetic
ttattttattatggaagtttgtacacttaacattgcaagactgtacatacttccatagtttattaa

SEQ ID NO: 1806 - DNA, 66 bp, Artificial Sequence
  Synthetic
attaattttgtacggaagtagatactatctttcaatatagaacgtttatagttccatacaaaaata

SEQ ID NO: 1807 - DNA, 67 bp, Artificial Sequence
  Synthetic
taaaatagtatgtatttatgtaagtttaaccacgaccaaccttacataaatggtaactattatatat

SEQ ID NO: 1808 - DNA, 66 bp, Artificial Sequence
  Synthetic
cccgacagttgatgacagggtgcgaccccaccaccaatatccgaaccctaaccgctctcggttggg

SEQ ID NO: 1809 - DNA, 66 bp, Artificial Sequence; identical to SEQ ID NO: 1808
  Synthetic

SEQ ID NO: 1810 - DNA, 67 bp, Artificial Sequence
  Synthetic
tatttataattttagtttctcgattcgtctccgtccagagagagaaattgaggtactaaacaacgta

SEQ ID NO: 1811 - DNA, 66 bp, Artificial Sequence
  Synthetic
gtaattattttatgtattcatttccggctattcaagtagctagtcttgaataccgaaaaaaaattc

SEQ ID NO: 1812 - DNA, 66 bp, Artificial Sequence
  Synthetic
tatattgtcatcaccctgttggcgtcaacctaattacaccaacaaggtgacgacaaagcgcgaacg

SEQ ID NO: 1813 - DNA, 67 bp, Artificial Sequence; identical to SEQ ID NO: 1593
  Synthetic

SEQ ID NO: 1814 - DNA, 67 bp, Artificial Sequence
  Synthetic
gaatgaatagctaattacagggacgccagcccaaataaaacaaggggttacgtgaaaacgtagcccc

SEQ ID NO: 1815 - DNA, 66 bp, Artificial Sequence
  Synthetic
taatagaaagaaaaatatatttattatatctaattgaaacggcttatagtcattatgtttattttg

SEQ ID NO: 1816 - DNA, 66 bp, Artificial Sequence
  Synthetic
tagatagagtttatggattataagaggtttattgggcaaaacctcttgaaatacataaaaagagtt

SEQ ID NO: 1817 - DNA, 67 bp, Artificial Sequence
  Synthetic
aagagattcaccaagacttttagattgaccacctagtacgttggcagtcacctgaacgtgggttgat

SEQ ID NO: 1818 - DNA, 66 bp, Artificial Sequence
  Synthetic
atcaataacggttgtatttgtagaacttgaccagtttttttagtaacataaatacaactccgaata

SEQ ID NO: 1819 - DNA, 66 bp, Artificial Sequence
  Synthetic
actcaaatgacatcaattctgtcctctcaagacatgtggagtgtgttgtcttgatgtcaagggtgg

SEQ ID NO: 1820 - DNA, 66 bp, Artificial Sequence; identical to SEQ ID NO: 1819
  Synthetic

SEQ ID NO: 1821 - DNA, 67 bp, Artificial Sequence; identical to SEQ ID NO: 1782
  Synthetic

SEQ ID NO: 1822 - DNA, 67 bp, Artificial Sequence
  Synthetic
gtctttatttttggtatcccgtttcttctccctccaacgagagaaatcgaggtactaaacaagctaa

SEQ ID NO: 1823 - DNA, 67 bp, Artificial Sequence
  Synthetic
attattatggattagtatctcatttattctccgtccagcgagagataacgaggtactaaataatcta

SEQ ID NO: 1824 - DNA, 67 bp, Artificial Sequence
  Synthetic
tccattaactgtggtgtacatcataacataactgttcgtagtcatgcaataatgtacaccgcagtaa

SEQ ID NO: 1825 - DNA, 66 bp, Artificial Sequence
  Synthetic
atagtaggaagatacagagtgtactctcaacgcacatcgagtgtgtaggactgcttacacgtgtgg

SEQ ID NO: 1826 - DNA, 67 bp, Artificial Sequence; identical to SEQ ID NO: 1770
  Synthetic

SEQ ID NO: 1827 - DNA, 67 bp, Artificial Sequence; identical to SEQ ID NO: 1629
  Synthetic

SEQ ID NO: 1828 - DNA, 67 bp, Artificial Sequence
  Synthetic
gtctttatttttggtatcccgtttcttctccctccaacgagagataacgagatactaaacaatctaa

SEQ ID NO: 1829 - DNA, 67 bp, Artificial Sequence
  Synthetic
tactttaattttgggttaatggtccatttcctctagtaaatgtattattaacccaaaaaaagagtct

SEQ ID NO: 1830 - DNA, 66 bp, Artificial Sequence
  Synthetic
agttttatttttgtctatataggctgtcggcatctgcggtatgcttatagggacaaaaattataaa

SEQ ID NO: 1831 - DNA, 67 bp, Artificial Sequence
  Synthetic
aaaaataaatatctttgtcgccatcgtgttggtgtaaacctaattacaccaacaaggtgacaacaaa

SEQ ID NO: 1832 - DNA, 66 bp, Artificial Sequence
  Synthetic
tacataatttcgtatattaggtataaccagtttcaattggaaatacctaatatacgaaaaaggtgt

SEQ ID NO: 1833 - DNA, 66 bp, Artificial Sequence
  Synthetic
cgccttttttcgtatattaggtatttccaattgaaactggttatacctaatatacgaaaatatgca

SEQ ID NO: 1834 - DNA, 66 bp, Artificial Sequence
  Synthetic
cgctttgttgtcaccttgttggtgtaattagattgttaccaacagggtgataacaaagctaatgaa

SEQ ID NO: 1835 - DNA, 67 bp, Artificial Sequence
  Synthetic
tttgtcgtcaccttgttggtgtaattaggtttacaccaacatgatgacaacgaagatatttactttt

SEQ ID NO: 1836 - DNA, 67 bp, Artificial Sequence
  Synthetic
tttgtcgtcatcttgttggtgtaattaggtttacaccaacttgatgacgacaaaaatatttattttt

SEQ ID NO: 1837 - DNA, 67 bp, Artificial Sequence
  Synthetic
agactctttttttgggttaataaaacatttactagaggaaatggaccattaacctaaaattaaagta

SEQ ID NO: 1838 - DNA, 66 bp, Artificial Sequence
  Synthetic
acaatacattttacttcaatgtataggtacattcggcacagcgagtttatctataagttgaagtaa

SEQ ID NO: 1839 - DNA, 67 bp, Artificial Sequence
  Synthetic
gtcgtcaccttgttggtgtaattaggttgactccaacagggtgatgacaatataaacatttcttttt

SEQ ID NO: 1840 - DNA, 67 bp, Artificial Sequence
  Synthetic
cgctcctttaattttgcttaaaggagcaaagactagtatcttatttatcttaagctaaaattaaaat

SEQ ID NO: 1841 - DNA, 66 bp, Artificial Sequence
  Synthetic
agtttaatttttgtctatattggctgtctgcatctgcggtatacttatagggacaaaaattataaa

SEQ ID NO: 1842 - DNA, 67 bp, Artificial Sequence
  Synthetic
ttttatacctttttgaatatatttagagatcgtcatttcaatagcactccccaaatctttttaatag

SEQ ID NO: 1843 - DNA, 66 bp, Artificial Sequence
  Synthetic
acaaaaaattagccacttttaggaactgtcctactggataattccatttaacgcaaacaaaaaaac

SEQ ID NO: 1844 - DNA, 67 bp, Artificial Sequence
  Synthetic
tgttctttttttggtatctcgtttcttcttcttccaacgagagaaaacgaggtactaaataaactaa

SEQ ID NO: 1845 - DNA, 67 bp, Artificial Sequence
  Synthetic
tgtatcttgatgtacaacattgctctttattttcaaatacagaataatgttgcataaaatagccctg

SEQ ID NO: 1846 - DNA, 67 bp, Artificial Sequence
  Synthetic
atgttcttttttggtatctcgtttcttcttcttccagcgagagataacgaggtactaaataatctaa

SEQ ID NO: 1847 - DNA, 66 bp, Artificial Sequence
  Synthetic
ggttttctttgcccctttgcgcgcacagtcccacgtatgtgcgcgcaaagggggaaggaggcggcc

SEQ ID NO: 1848 - DNA, 66 bp, Artificial Sequence
  Synthetic
ctgcatctaccatgttctacaatctaccagcatcgacacttcattggtaggacttggtagaacggt

SEQ ID NO: 1849 - DNA, 67 bp, Artificial Sequence
  Synthetic
gcgcatttagtttgtgtttttaaaagcaataggatctccttttgcttttaaagacataacaaatagt

SEQ ID NO: 1850 - DNA, 67 bp, Artificial Sequence; identical to SEQ ID NO: 1741
  Synthetic

SEQ ID NO: 1851 - DNA, 67 bp, Artificial Sequence; identical to SEQ ID NO: 1688
  Synthetic

SEQ ID NO: 1852 - DNA, 66 bp, Artificial Sequence; identical to SEQ ID NO: 1573
  Synthetic

SEQ ID NO: 1853 - DNA, 67 bp, Artificial Sequence
  Synthetic
tagattatttagtacctcgttatctctcgctggacggagacgaatcgagaaactaaaattataaata

SEQ ID NO: 1854 - DNA, 67 bp, Artificial Sequence
  Synthetic
atagtaggaagatactaagtagacagtcaatgcacatcgagtgtgtaggtctgcttactcgtgtaga

SEQ ID NO: 1855 - DNA, 66 bp, Artificial Sequence
  Synthetic
atcatccttatacgtgtttagctatgtaaaagcaccagtattcttgccttaacactcatggtattc

SEQ ID NO: 1856 - DNA, 66 bp, Artificial Sequence
  Synthetic
ggtttttttgtgtgtggttttgtatgttaaatcacaatcaaaatgctaataccacacactacaata

SEQ ID NO: 1857 - DNA, 67 bp, Artificial Sequence
  Synthetic
attacaatattactttatttagtctatctttaggtggaactggactgaattaagtcaaaatataaac

SEQ ID NO: 1858 - DNA, 66 bp, Artificial Sequence
  Synthetic
caccttttttatttgcccctttaggcgcactgtttcacgtctgtgagcctaaaggggcatccccac

SEQ ID NO: 1859 - DNA, 67 bp, Artificial Sequence; identical to SEQ ID NO: 1596
  Synthetic

SEQ ID NO: 1860 - DNA, 67 bp, Artificial Sequence
  Synthetic
aaagtttttttagacgtactaaccaatatcatcccagcggaaagtatcagttaggcacataaattag

SEQ ID NO: 1861 - DNA, 66 bp, Artificial Sequence
  Synthetic
ggttttttgtttgcgttaaatggaattatccagtaggacagttcctaaaagtggctaattttttgt

SEQ ID NO: 1862 - DNA, 66 bp, Artificial Sequence
  Synthetic
tatattgtcatcaccctgttggcgtcaacctaattacaccaacaaggtgacgacaaagcacgaacg

SEQ ID NO: 1863 - DNA, 67 bp, Artificial Sequence; identical to SEQ ID NO: 1618
  Synthetic

SEQ ID NO: 1864 - DNA, 67 bp, Artificial Sequence
  Synthetic
aattattacttgtgtttttgtagtggttgctgataaaactattacaaatacacaagtatagaaatag

SEQ ID NO: 1865 - DNA, 66 bp, Artificial Sequence
  Synthetic
gggaaagttttggggaagattttacatcatcataataaatatcctccggcatagccggaggttttt

SEQ ID NO: 1866 - DNA, 66 bp, Artificial Sequence; identical to SEQ ID NO: 1589
  Synthetic

SEQ ID NO: 1867 - DNA, 66 bp, Artificial Sequence
  Synthetic
taaaatgttcccattgattgtggtgtgtgtcctttcgtatactatgggaacattttgatttaatac

SEQ ID NO: 1868 - DNA, 66 bp, Artificial Sequence
  Synthetic
tggggtcttgcatccagcgtgaatggttgtgcgaaactttcatgccacgctggatacaaacgcgcg

SEQ ID NO: 1869 - DNA, 66 bp, Artificial Sequence
  Synthetic
tttttttacgtgaatgttttgtaactactacgacctacctcgtaacacaccattcatcaaaatcta

SEQ ID NO: 1870 - DNA, 66 bp, Artificial Sequence
  Synthetic
gtttttattttatgccttaattatacaccgcacttgcagtatgtcaatatggcaaaaagctattct

SEQ ID NO: 1871 - DNA, 66 bp, Artificial Sequence
  Synthetic
ttaatttagtatggaagtatgcacaattaaccaatgtttagtgtgtatacttccataaaaattaac

SEQ ID NO: 1872 - DNA, 66 bp, Artificial Sequence
  Synthetic
atagtaggaagatactaagtagacagtcaacgcacatcgagtgtgtaggactgcttacacgtgtgg

SEQ ID NO: 1873 - DNA, 66 bp, Artificial Sequence
  Synthetic
caaataatgtagtacccaaattatgtttcacacaagcaaccttaatcgggtactacttaatatcta

SEQ ID NO: 1874 - DNA, 67 bp, Artificial Sequence
  Synthetic
tggaaaatttgataaatttggttacgttcatttcaatcaaggatagtgaaattattgctttttcgaa

SEQ ID NO: 1875 - DNA, 67 bp, Artificial Sequence
  Synthetic
cttgttttattaatatttacgtaacgttatcagttggtagcgttacgtaaatataactaattattta

SEQ ID NO: 1876 - DNA, 66 bp, Artificial Sequence
  Synthetic
cccaaccgagagcggttagggttcggatattggtggtggggtcgcacccttgtatgaaactgacct

SEQ ID NO: 1877 - DNA, 66 bp, Artificial Sequence; identical to SEQ ID NO: 1876
  Synthetic

SEQ ID NO: 1878 - DNA, 66 bp, Artificial Sequence
  Synthetic
ctcccagtgtaggatttatatcgctagggtgccccaacgaatagaaaagtaaaccagttttcagcg

SEQ ID NO: 1879 - DNA, 66 bp, Artificial Sequence
  Synthetic
cccctagtataggatgggtttcgttagggtgccccaacgaatagaaaagtaaaccagctttcagcg

SEQ ID NO: 1880 - DNA, 67 bp, Artificial Sequence
  Synthetic
agcgatgagtatacttttgctatcctacgggcacccaagcgacaccattcctatactatacggcttc

SEQ ID NO: 1881 - DNA, 67 bp, Artificial Sequence; identical to SEQ ID NO: 1616
  Synthetic

SEQ ID NO: 1882 - DNA, 66 bp, Artificial Sequence
  Synthetic
aagagtgagagttttactatccttgattgaaatgtaggttactaaaattatttatattttccaatt

SEQ ID NO: 1883 - DNA, 67 bp, Artificial Sequence
  Synthetic
cttctaatttttgtttgtataagcataacacatttgagtgtgtgacgcttattacaacattttcacc

SEQ ID NO: 1884 - DNA, 67 bp, Artificial Sequence
  Synthetic
agctcgggttcttcgtgttttgccacgtatgttgaccgacagacacggcaaaacacgcagcgcctat

SEQ ID NO: 1885 - DNA, 66 bp, Artificial Sequence
  Synthetic
tctttttttatgtatggtttgtaacaatatccacctacaatgtgctaaaccatacatgttaaaaat

SEQ ID NO: 1886 - DNA, 66 bp, Artificial Sequence; identical to SEQ ID NO: 1825
  Synthetic

SEQ ID NO: 1887 - DNA, 66 bp, Artificial Sequence; identical to SEQ ID NO: 1825
  Synthetic

SEQ ID NO: 1888 - DNA, 67 bp, Artificial Sequence
  Synthetic
cgaaatatcgcaattacataaagcatgtacatgcatggtttatagtattgcaaccattctaccaaat

SEQ ID NO: 1889 - DNA, 67 bp, Artificial Sequence; identical to SEQ ID NO: 1616
  Synthetic

SEQ ID NO: 1890 - DNA, 66 bp, Artificial Sequence
  Synthetic
tgttgaataggttggtcattggagaaccgagccacgttgagagcgtagtattgttgactaaagcac

SEQ ID NO: 1891 - DNA, 66 bp, Artificial Sequence; identical to SEQ ID NO: 1890
  Synthetic

SEQ ID NO: 1892 - DNA, 66 bp, Artificial Sequence
  Synthetic
ttgagcacttgtgcagttcgcgttgaccgtcccgacggtgacttcataatgcacctctcacagttg

SEQ ID NO: 1893 - DNA, 66 bp, Artificial Sequence
  Synthetic
tgaatttttttcggtattcaagaccagctacttgaatagcccgaaatgaatacataaaaagataac

SEQ ID NO: 1894 - DNA, 67 bp, Artificial Sequence
  Synthetic
cgtttatagtgttttaggtggttggcacccctaccgacatagctatatcaaccctcaataaatttat

SEQ ID NO: 1895 - DNA, 66 bp, Artificial Sequence
  Synthetic
ctaataattgtatcaaatatggaacgcataccgaagtgtgagttctgaaattgatacaatacaact

SEQ ID NO: 1896 - DNA, 66 bp, Artificial Sequence; identical to SEQ ID NO: 1895
  Synthetic

SEQ ID NO: 1897 - DNA, 66 bp, Artificial Sequence; identical to SEQ ID NO: 1664
  Synthetic

SEQ ID NO: 1898 - DNA, 66 bp, Artificial Sequence; identical to SEQ ID NO: 1664
  Synthetic

SEQ ID NO: 1899 - DNA, 66 bp, Artificial Sequence; identical to SEQ ID NO: 1664
  Synthetic

SEQ ID NO: 1900 - DNA, 67 bp, Artificial Sequence; identical to SEQ ID NO: 1643
  Synthetic

SEQ ID NO: 1901 - DNA, 67 bp, Artificial Sequence
  Synthetic
aacgatgctcgcgagtcctttagagacactgacccacgtcagtggatctaaaggaccacatcggagc

SEQ ID NO: 1902 - DNA, 66 bp, Artificial Sequence
  Synthetic
taacttatgtacggaagtatagacactcgattaatatttaatgtgtatacttccgtaaaaataacc

SEQ ID NO: 1903 - DNA, 66 bp, Artificial Sequence
  Synthetic
tttttaaattttggtaattaatggagtgaacatcaactgaaattacttctataaactaccaaaata

SEQ ID NO: 1904 - DNA, 66 bp, Artificial Sequence; identical to SEQ ID NO: 1753
  Synthetic

SEQ ID NO: 1905 - DNA, 67 bp, Artificial Sequence
  Synthetic
ttagcttatttagtacctcgttttctctcgttggagggagaagaaacgggataccaaaaataaagac

SEQ ID NO: 1906 - DNA, 66 bp, Artificial Sequence
  Synthetic
gaaaaaaagtgtacatggtagagagttaaaccagtttaatactccaccatgtacacgaagtgaaaa

SEQ ID NO: 1907 - DNA, 66 bp, Artificial Sequence
  Synthetic
tttatttaatgtagttaggttgtgtttaattgaccaaacactatataactacaataaaagagcaca

SEQ ID NO: 1908 - DNA, 66 bp, Artificial Sequence
  Synthetic
taacttatgtacggaagtatagacacttgattaatatttaatgtgtatacttccgtatttttatag

SEQ ID NO: 1909 - DNA, 66 bp, Artificial Sequence; identical to SEQ ID NO: 1644
  Synthetic

SEQ ID NO: 1910 - DNA, 67 bp, Artificial Sequence; identical to SEQ ID NO: 1853
  Synthetic

SEQ ID NO: 1911 - DNA, 66 bp, Artificial Sequence
  Synthetic
gttatctttttatgtattcatttcgggctattcaagtagctggtcttgaataccgaaaaaaattca

SEQ ID NO: 1912 - DNA, 67 bp, Artificial Sequence
  Synthetic
agcatggtttgtatattggctaacgttcgggttgccgagcgttagccaatatacatattaacagggc

SEQ ID NO: 1913 - DNA, 66 bp, Artificial Sequence; identical to SEQ ID NO: 1641
  Synthetic

SEQ ID NO: 1914 - DNA, 67 bp, Artificial Sequence
  Synthetic
tactttaattttaggttaatggtccatttcctctagtaaatgttttattaacccaaaaaaagagtct

SEQ ID NO: 1915 - DNA, 67 bp, Artificial Sequence
  Synthetic
tactttaattttaggttaatggtccatttcctctagtaaatgtttaattaacccaaaaaaagagtct

SEQ ID NO: 1916 - DNA, 66 bp, Artificial Sequence
  Synthetic
ccacacgtgtaagcagtcctacacactcgatgtgcgttgagagtacactctgtatcttcctactat

SEQ ID NO: 1917 - DNA, 66 bp, Artificial Sequence; identical to SEQ ID NO: 1916
  Synthetic

SEQ ID NO: 1918 - DNA, 66 bp, Artificial Sequence
  Synthetic
tataaaaaatacggaagtatacacattaaatattaatcaggtgtctatacttccgtacatacgtta

SEQ ID NO: 1919 - DNA, 66 bp, Artificial Sequence
  Synthetic
gtataaatatatggaagtacacacattatacattgctcaattgtgcatacttccatactaaattaa

SEQ ID NO: 1920 - DNA, 66 bp, Artificial Sequence
  Synthetic
cacggcattgtattaaactcagtaagattatttctatgttcctactgattttgatacaaaagaaaa

SEQ ID NO: 1921 - DNA, 66 bp, Artificial Sequence; identical to SEQ ID NO: 1920
  Synthetic

SEQ ID NO: 1922 - DNA, 67 bp, Artificial Sequence
  Synthetic
gtaggctctttttgggttaatataacactcactagagtcaatgttcctttaacccaaaaattaaagg

SEQ ID NO: 1923 - DNA, 66 bp, Artificial Sequence; identical to SEQ ID NO: 1722
  Synthetic

SEQ ID NO: 1924 - DNA, 66 bp, Artificial Sequence
  Synthetic
cccctagtataggatgggtttcgttagggtgccccaatgactgcaaaagtaaactcaatctttaag

SEQ ID NO: 1925 - DNA, 66 bp, Artificial Sequence; identical to SEQ ID NO: 1664
  Synthetic

SEQ ID NO: 1926 - DNA, 66 bp, Artificial Sequence; identical to SEQ ID NO: 1664
  Synthetic

SEQ ID NO: 1927 - DNA, 66 bp, Artificial Sequence; identical to SEQ ID NO: 1664
  Synthetic

SEQ ID NO: 1928 - DNA, 66 bp, Artificial Sequence
  Synthetic
aataatatttttatccttattgacatatgaggaatcccatgtataattaggggataaaaataaaaa

SEQ ID NO: 1929 - DNA, 67 bp, Artificial Sequence
  Synthetic
gaatagctttttgccatattgacatactgcaagtgcggtgtataattaaggcataaaataaaaactg

SEQ ID NO: 1930 - DNA, 67 bp, Artificial Sequence
  Synthetic
gtggaatttttagtattcataacgggctattcaaacaaccaatcatgaatactaaaattatcataaa

SEQ ID NO: 1931 - DNA, 67 bp, Artificial Sequence
  Synthetic
gaagccgtatagtataggaatggtgtcgcttgggtgcccgtaggatagcaaaagtatactcatcgct

SEQ ID NO: 1932 - DNA, 67 bp, Artificial Sequence
  Synthetic
ttactgcggtgtacattattgcatgactacgaacagttatgttatgatgtacaccacagttaatgga

SEQ ID NO: 1933 - DNA, 67 bp, Artificial Sequence
  Synthetic
ttactgcggtgtacattcttgcatgactacgaacagttatgttatgatgtacaccacagttaatgga

SEQ ID NO: 1934 - DNA, 66 bp, Artificial Sequence
  Synthetic
ctctcctgaagtgtcagttgagcgccttcggttttccgagtgcgcgtgaactacagttctagcatg

SEQ ID NO: 1935 - DNA, 67 bp, Artificial Sequence
  Synthetic
cagggttactttatacaacattaatctgtatttgaaaataaagagcaatgttgtacatcaagataca

SEQ ID NO: 1936 - DNA, 67 bp, Artificial Sequence; identical to SEQ ID NO: 1637
  Synthetic

SEQ ID NO: 1937 - DNA, 66 bp, Artificial Sequence; identical to SEQ ID NO: 1776
  Synthetic

SEQ ID NO: 1938 - DNA, 66 bp, Artificial Sequence; identical to SEQ ID NO: 1776
  Synthetic

SEQ ID NO: 1939 - DNA, 67 bp, Artificial Sequence; identical to SEQ ID NO: 1617
  Synthetic

SEQ ID NO: 1940 - DNA, 66 bp, Artificial Sequence
  Synthetic
ctccttttattagggtttgtgtcatctacacacatgtaaagtttacataaaccctaaaaagatcga

SEQ ID NO: 1941 - DNA, 67 bp, Artificial Sequence
  Synthetic
gtctttatttttggtatcccgtttcttctccctccaacgagagaaaacgaggaactaaacaatctaa

SEQ ID NO: 1942 - DNA, 67 bp, Artificial Sequence; identical to SEQ ID NO: 1941
  Synthetic

SEQ ID NO: 1943 - DNA, 67 bp, Artificial Sequence
  Synthetic
atgttcttttttggtatctcgtttattcttcttccaacgagaggaaacgaggaactaaacaatctaa

SEQ ID NO: 1944 - DNA, 67 bp, Artificial Sequence
  Synthetic
tgttctttttttggtatctcgtttcttcttcttccaacgagaggaaatgaggcactaaaccagttga

SEQ ID NO: 1945 - DNA, 66 bp, Artificial Sequence
  Synthetic
cgttcgtgctttgtcgtcaccttgttggtgtaattaggttgacgccaacagggtgatgacaatata

SEQ ID NO: 1946 - DNA, 67 bp, Artificial Sequence
  Synthetic
tttctaagcttttacaagcagagcaacacactccacgtgtggtgataggtcttacccatattatgga

SEQ ID NO: 1947 - DNA, 67 bp, Artificial Sequence; identical to SEQ ID NO: 1946
  Synthetic

SEQ ID NO: 1948 - DNA, 67 bp, Artificial Sequence
  Synthetic
tctacacgagtaagcagacctacacactcgatgtgcattgactgtctacttagtatcttcctactat

SEQ ID NO: 1949 - DNA, 67 bp, Artificial Sequence; identical to SEQ ID NO: 1741
  Synthetic

SEQ ID NO: 1950 - DNA, 67 bp, Artificial Sequence; identical to SEQ ID NO: 1628
  Synthetic

SEQ ID NO: 1951 - DNA, 67 bp, Artificial Sequence
  Synthetic
atagtaggaagatactaagtagacagtcaacgcacatcgagtgtataggtctgctcactcgccaaga

SEQ ID NO: 1952 - DNA, 67 bp, Artificial Sequence; identical to SEQ ID NO: 1951
  Synthetic

SEQ ID NO: 1953 - DNA, 66 bp, Artificial Sequence; identical to SEQ ID NO: 1916
  Synthetic

SEQ ID NO: 1954 - DNA, 66 bp, Artificial Sequence; identical to SEQ ID NO: 1916
  Synthetic

SEQ ID NO: 1955 - DNA, 66 bp, Artificial Sequence
  Synthetic
tattagttagatgtcatagaccgatttacagcggactgtaggttgatctaggacacctaaccaata

SEQ ID NO: 1956 - DNA, 66 bp, Artificial Sequence
  Synthetic
gtgctttagtcaacaatactacgctctcaacgtggctcggttctccaatgaccaacctattcaaca

SEQ ID NO: 1957 - DNA, 66 bp, Artificial Sequence; identical to SEQ ID NO: 1956
  Synthetic

SEQ ID NO: 1958 - DNA, 66 bp, Artificial Sequence
  Synthetic
tttttatttttatcccctaattatacatggcattcctcatatgtcaataaggataaaaatattatt

SEQ ID NO: 1959 - DNA, 67 bp, Artificial Sequence; identical to SEQ ID NO: 1822
  Synthetic

SEQ ID NO: 1960 - DNA, 66 bp, Artificial Sequence; identical to SEQ ID NO: 1716
  Synthetic

SEQ ID NO: 1961 - DNA, 66 bp, Artificial Sequence; identical to SEQ ID NO: 1589
  Synthetic

SEQ ID NO: 1962 - DNA, 67 bp, Artificial Sequence; identical to SEQ ID NO: 1618
  Synthetic

SEQ ID NO: 1963 - DNA, 66 bp, Artificial Sequence; identical to SEQ ID NO: 1958
  Synthetic

What is claimed is:

1. A method comprising:
mining from a protein database putative recombinase sequences based on conserved recombinase domain architecture or other measure of homology to known recombinases;
linking the putative recombinase sequences to prokaryotic genomic sequences containing their corresponding coding sequences;
scanning those genomic sequences to identify prophage sequences containing the coding sequences;
aligning the prophage sequences and their boundary-flanking sequences with homologous genomic sequences, optionally, from the same genus to produce sequence alignments; and
automatically solving for putative cognate recombinase recognition sites by detecting overlapping sequences in the sequence alignments, thereby producing a solved recombinase list.

2. The method of claim 1, wherein the mining is based on a precisely ordered recombinase domain superfamily architecture or other measure of homology to known recombinases.

3. The method of claim 1, wherein the linking includes accessing a database that comprises annotated records of genomes assembled from long-read nucleotide sequences, short-read nucleotide sequences, or a combination of long- and short-read nucleotide sequences, or directly annotated records of long-read nucleotide sequences.

4. The method of claim 1, wherein the linking includes automatically removing uninformative nucleotide sequences from the genomic coding sequences.

5. The method of claim 1, wherein the genomic coding sequences includes at least 2, at least 5, at least 10, at least 25, at least 50, or at least 100 annotated genomic coding sequences.

6. The method of claim 1, wherein the boundary-flanking sequences have a length of at least 20 kilobases.

7. The method of claim 1, wherein the automatically solving includes defining multiple putative cognate recombinase recognition sites for a single recombinase.

8. The method of claim 1, wherein the automatically solving includes implementation of an algorithm that includes a measure of confidence in each predicted recombinase recognition site set, optionally in the form of ambiguity scores.

9. The method of claim 1, further comprising verifying that all putative cognate recombinase recognition sites solved flank a sequence encoding at least one of the putative recombinase sequences.

10. The method of claim 1, wherein the putative recombinase sequences comprise tyrosine and/or serine recombinase sequences, optionally wherein the serine recombinase sequences comprise resolvase and/or integrase sequences.

11. The method of claim 1, further comprising continuously updating the solved recombinase list as the protein database is updated.

12. A computer readable medium on which is stored a computer program which, when implemented by a computer processor, causes the processor to:
mine from a protein database putative recombinase sequences based on conserved recombinase domain architecture or other measure of homology to known recombinases;
link the putative recombinase sequences to prokaryotic genomic sequences containing their corresponding coding sequences;
scan those genomic sequences to identify prophage sequences containing the coding sequences;
align the prophage sequences and their boundary-flanking sequences with homologous genomic sequences from the same genus to produce sequence alignments; and
solve for putative cognate recombinase recognition sites by detecting overlapping sequences in the sequence alignments.

13. The computer readable medium of claim 12, wherein the mining is based on a precisely ordered recombinase domain superfamily architecture or other measure of homology to known recombinases.

14. The computer readable medium of claim 12, wherein the linking includes accessing a database that comprises annotated records of genomes assembled from long-read nucleotide sequences, short-read nucleotide sequences, or a combination of long- and short-read nucleotide sequences, or directly annotated records of long-read nucleotide sequences.

15. The computer readable medium of claim 12, wherein the linking includes automatically removing uninformative nucleotide sequences from the genomic coding sequences.

16. The computer readable medium of claim 12, wherein the solving includes (i) defining multiple putative cognate recombinase recognition sites for a single recombinase; or (ii) implementation of an algorithm that includes a measure of confidence in each predicted recombinase recognition site set, optionally in the form of ambiguity scores.

17. The computer readable medium of claim 12, further comprising verifying that all putative cognate recombinase recognition sites solved flank a sequence encoding at least one of the putative recombinase sequences.

18. The computer readable medium of claim 12, further comprising continuously updating the solved recombinase list as the protein database is updated.

19. A system configured to perform:
mining a protein database putative recombinase sequences based on conserved recombinase domain architecture or other measure of homology to known recombinases;
linking the putative recombinase sequences to prokaryotic genomic sequences containing their corresponding coding sequences;
scanning those genomic sequences to identify prophage sequences containing the coding sequences;
aligning the prophage sequences and their boundary-flanking sequences with homologous genomic sequences from the same genus to produce sequence alignments; and
solving for putative cognate recombinase recognition sites by detecting overlapping sequences in the sequence alignments.

20. The system of claim 19, wherein the system is a computer system.
